United States Patent Application Publication US 2025/0205292 A1 - sequence listing, part 5

SEQ ID NO: 8 - DNA, 2242605 bp, Bifidobacterium bifidum
  source 1..2242605: mol_type = genomic DNA
atgtcggatgaccttctcggtccagccgggcaagccacgcggatatggtcggacacgctgcgtctgctcaagcagaatcccacgctgtcgccgcgtgacaagagctggcttgaaggagtcgtaccggaagcggtatatggcacgaccatcgtattgtgcgtaagcaacatggccacgcagcaagcgttgcagaatgaactcaatgcgccgctgctcaacgctttgaaaatcatatccggaaacgacatgttcccggcgttcaaaatcgtggctcctcaggtgtcccaaccggaaccgcagccgccggcatcccggcatcccgatactgcggcgaaaccgagcgaaccgttccctgcgaatccgtcgccgaccgtcgccgatctggctcaggaatcctacatgcccaacagcatgcagtcaatctcctccatcgattcgatttccgcggaaatgacggaggcgaatcagcaaccaggcgcctcggctcctcgaatacccggcgagccgagttttccggtacggcagcagaaggtgatgcgcgatccggaaacccatctgaacaaaaactcgacgttcgacacgttcgttcccggtgattccaaccgtttcgcacgcactgtcgcgcttgcggtcgccgagggaaccgggcaggaattcaacccgttgtgtatctacggcggatcgggactgggcaagacccacctgctcaacgccatcggcaactatgcattggtcaaggatcccacgctcaaggtccgatacgtcaacagcgaggaattcaccaacgaattcatcgaggcactgcagaccccggcccagagccagaaccgcatcgcagaattcaaccgccgataccgcgaggtcgacgtgttgctcatcgacgacatccagttcctcggcggcaaggaagcgaccctcgaacagttcttccacacattcaacgcgctgcatcaggccaacaagcgtatcgtcatcgcgtccgatgtcgcgcccaagaacctcaagggcttcgaggcacgactcatctcgcgtttcgactccggactcaccgtcgatgtcaagccgcccgatcttgagacccgcatcgctattttgcgcatgatggcttcgatgaacggcacttcgacaccgaatgacgtgctgaatctgatcgcggagcgcttcaccgagaacatccgcgagctggaaggcgccctgattcgcgtgagcgcggtggcatcgctgagcagtcagccggtgacccgcgcgcttgccgagcagacgctgcaggacttcttcaccaccgacgtggaaatcaagccgaccgacatcatcgggcagacggcgaagtacttccatctgacattcgacgacatcgtcgggcgcgcgcgaacgaaaaacatcgcgctggcccgtcaggtcgccatgtatcttgcccgtgagatgaccagcatgagcctggtcgatatcggcgaagtgttcggcggccgcgatcacaccacggtcatgcacgcgtatacccgcgtcagcgatgatatgcaggaaaagcctgaaatttacaactacgtgaccgagctgaccgcgcgcctcaagcagcgcggcaatgagtgacgacagtcgttttctctcggctgtgcaatggtcccgtctggcacgatcgcgctgagacaccaaaaaacgccttttttcgtcgctgtgcgtgattctgctggatgaaggcctgattcgtcaccgtcgacaggacctatcagactcaaataatatagacatacatatttaatctgtacaataaaacaggcgcaacacgccgaacgatctgctgattgaaggaaaagttatccacatgcttattcacaaatgtgggtagagcctgcggataacttgtggactactgcacattttttgtggatgaacagtggattaatccacaggaaatgtggacaatcaaaatagttcgccgaaaatgtggataactcggtacttatgcacattttgtccggaaagttatccacataatctgtgggttactcagcccatataaacacaaggattcgcgcagttatccacactatccacagggcttattactacgactatcttatttctctttcgataaccgtcgtgatgataactcacttcgcgcatgagaaaaaacaatccgaacatgacccgctagaatgttgccaagcacatcgtgaaatgagggaacccatgaaagtagaaatcgattccgcggctctcgccgacgccgtagcctggacgacccgcgtcatcgacgcccgaccggcgagccccatccttgcaggtatccagctcgaagccatcgacggcacccttcaactgtccgcgttcaattacgagatttccgcccgtcaccacatcgaggccggtatcgacgaacccggaaccgcactggtactcggcaaactcctcgccgacatcaccaagtcactgcctgccgaaaagacctacctgtcgaccgacggctccaccatgaccatcaactcgggcaagtccacgttcaccatgcagctcatgcccgatgccgaatacccggatctgccggtcgtgccggcaaagctcggccaggtcgacgcacccacgttcatccaggccgtaacccaggccagcgtcgcggtctcccgcgaggagaaccgcccggtgctgaccggcgtgcgcatgcagttcgacggcgacaaagtcaccatgacctcgaccgaccgtttccgcctgtcccgcgccacgttcacctggacgccgcagaacatcgacacctctacgaccacactggtgcgcggatccctgttgcgcgacgtcgcccgcgcacttgacgatcaccagaacgtcgtcatcgatttcgacgccgacaaccccacgctgctcggtttcgagaacgccggacgcgtctcgacatcccagctgatcgacggcgaattccctgcggtcgaccgcctgttcgccgacgaatacccgattcaggccgtcattgacaagcagctgctgatcgctgccatcaagcgcgtcgcgctggtcgccgaacgcaacgccccgatccgcatggtgttctccggccaggaagtcaccctgtccgccggcgccgtggacgaagcccaggcgcaggaaatgctggacatcgacatggacggcgaagacatcaccgtcgcgttcaacccgtcctacctgatcgaaggcctgagcgccatcactgagccgttcgtgcgcatgaagatgaccacggccgtcaagcccgtcgaattcaacggccagcaggaggcggacagcgacgaatcgatggattaccgctatctgctcgtcccgatgcgtttcaacagctgagcccgacggctgaacactggaatccgaatcgaatcgccggcaccgccgaaacacacggtgccggcgatgacatgacaggagcccgtcttgtacatttcgcgtcttgcgcttgaccattaccggtcatggaaccattgcatgctcgacctcacgccgggcatcaacatcctgcagggggcgaacgggcttgggaaaaccaacatcgtcgaagcgatagaagtgctgtccacgggcctgagccatcgcacatccagctcggttccgctggtgcagcgcggcgaacatgcagcgacgatccgggccaatatcgaatccgtgacggatccggagcccgctgatgatggcgtcaataccagcgctgatgccgtggatatctcggacatgaaaccggtccggcagacacagaccaccacccttgaggccacgattgcggcacgcggcgccaaccgcgcccgcatcaacggcgggcagtcgcggtatctgcgggagattctcggcacgctgccgaccgtgagcttcaccccggaggatcagcagcttgtggcgggcgaccccgccgtgcgccgctcgttcatcaaccaggtcgcctcgctgctgattcccggatatgcgaaccggttgcaatcattcacgcacgtcgccaagcaacgggcggcactgctcaaacagctcggtcaatggcagcgtgcaggatccccgattgacgccgcgctcagcgggctggagatctggaccggacagttcatcgaggcgggagtcgcgctcagccgcgacaggcagcgcatcatcgcggaactgaacaagtcgttcggcccgctgtatgccagattggccggtgtggcgggcgacttgccgtccaatgcggaaattcaggatgccgcgcaggatggtggtgagcaggcagcggtcgaatacgtgccgtcattcgacgagatccttggaacacaggcgcccgaaccgttgataagccagcatttccagcgcatctatcccggcgaggtgtctcgcggcgtcaatctgatcggcccgcaacgagatgacctgttggtgacgctcaatggcatgccggccagggaattcgcctccaacggcgagatgtggacgttggccctggcattgaagatggcacaataccgggccctctgcgagtatttcgacaccaggccggtggtgattctcgacgatgtgttcgctcagctcgacgaatcgcgccgcaccgagatcctgcgttttgccgcggctcaggatcaggtactgatcaccgcggccgcggaaagcgatattccgatactgccggcgaatgagtcgacagaatccggcgagataccggtgaaccgcatcgcagtggccgatctcaaacggcgcgacgaagcggatgccgagagggccggcgaacaatgaccgaaccccgcaagccgaatacgccgggcgggccgggggcaccgagcaggcccgacaagccgggcagcgcggtcaagccgggcaatgtacacgattcgcacgagccgatttgcgcgaccctgcatctcgaccagcgcaaactgcccgccacggtgttcgagcacatcgccaagatggcgggaggaaggcgtcagcggatgattgacgccgaggccgcatgggagaacttcggcaagccgggccgcgacccgagcaccttgggcagcgtaacggcgctgattgcgaataacggtcattggataccgtatctgaaaatcgcgcagctgcgcaatcactgggatcaggtggtcggaccggtcatcgcccagcattcgcaggtcatcgggctgcgcgacggagtcatgaccatccgtgccgattccgcggcttgggccacccagctcacctacctgattccgcagctggaacgtaccatcaaggagcgcctgcaggggttggacgtccacaagatccaggtaacaggcccccgtgccgcgacatttcgcggctcaaggatgaagaggcgctaaattcgctcagagagccaaagtccccgtagacgggtaggattggcggataataggttcagcgcttagaaacccccgttattcgcgttttagagcgtatcgcccgcagaacaacctttcatgacgaaagaatatgcaggaaggaaaccgttagtggcagttcttgaatcggattccgaacatgaatcccgtgacgagtccggcatgcctgagcaggctccgggcagcggtctgacggcgagcagcgccgagcagcatgaccgcgaggtcgatgaagccatcgcccaggacgagctcgatgacgcccagcttgacgacaccttatcgcccgaccattatgacgccagcgacctgaaggtgctggaaggccttgaggcggtgcgcatccgcccgggcatgtacatcggctccaccggcccgcgcggtctgcaccacctggtctacgagatcgtcgacaactccgtcgacgaggcactggccggctacgccacgcatatcgaagtgacgatcctgccggacaacggcatccgcgtcgttgacgacggtcgaggcatcccggtcgacgaagttcccggcgaaggcgtctccggcgtcgagaccgtgatgaccaagctgcacgccggcggtaaattcggcggcggcggatacgcggtgtccggcggccttcacggtgtcggcatctccgtggtcaatgcgctgtcgacgcgagtcgatatcgaagtgcggcgccagggattccactggacccagacatacgtcaatcagcatccgacggcccgcctcgccaagggcgccccgatggccgaggatgagtcgaccggcacttccgtgacgttctggcccgatgcggcgatcttcgaaagcacggtatacgacttcgagacgctgcgctcccgcttccagcagatggcgttcctgaacaagggactgaagatttcactcaccgacctgcgcgagccggatctggccggcgacgaagtggccggcgatgacgattccaccgagccgaagcaccagagcgtgacttaccagtacatgaacggcatcaaggattatgtctcgtacctggtcaagtcccgcaaggccactcccgtcgaggaggatgtcatcgatttcgaggccgaagacctcaagatcggcatctcggccgaggtcgcgatgcagtggaccaccgcgtattccgaggctgtgcacacgttcgcgaacacgatctccaccacagagggcggcacgcacgaagaaggcttccgtgcagcgctgacctcgctggtgaaccggtatgcgcgagacaagaacatcctcaaggagaaggatgacaacctctccggcgacgatgtgcgcgaaggcctgaccgccgtcgtgtccgtcaagctgaccactcctcagttcgaagggcagacgaagaccaagctcggcaactccgaggcgaagaccttcgtgcagcgcgtgatgaccgacaagctcggcgactggttcgacgcgcaccccgcagaggccaagaacatcatccagaaggccatcgaagcctcccgcgcccgcatcgcggcgaagaaagcccgcgagaacacccggcgcaagtcgattttcgagtcggccggcatgcccgacaagctcaaggactgccagtccagcaaccccgaagagtgcgagctgttcatcgtcgagggtgattcggcaggcggctccgccattcaagggcgaaacccggaaacgcaggccatcctgccgcttcgaggcaagattctcaacaccgaacgcgcctccatcgaccgcatgatgaagtccgacaccatcgagtcgctgatcaccgcggtcggcggcggctatggcgaggaattcgacgtgagcaaggtgcgctaccacaaggtcatcatcatggccgatgcagatgtggacggtgcccatatcgccacgctgaacctgacgctgttcttccgttacatgcgaccgatgatcaccgcaggatacgtgtatgtggccatgcctccgctgtaccgtctcaagtggacgcgcggcgatcatgattacgtgtacaccgaccgcgaacgcgacgagaaactcgcccagggcaaggccgcaggccggcagctgcccaagggcgaaggcatccagcgctacaagggtctgggcgagatgacctaccaggagctgtgggagaccaccatggatcctgagcaccgcatcctgaagcagattcacatcgaggatgccgcggcagcggacgagaccttctcgatgctgatgggcgacgacgtggaaccgcgccgtcttttcatccaacgcaatgccaaggatgtgcgtttcatcgacgcttaaggctctaatccaagccccgccggcgggggggggtcagcgcagctgactggggggggtggtcccgatccacccgatgacagcgacagaaacgacgcccaacatacggtcgaacagattttaaccaaaggacaaccaagtggcagacgaaaacagcaacggcaccgacctgccggagcagaacgacgagcgtgccgaacactcgatggagcccatcagccctcaggccaacgaacagttggtcctcgacgacaatcgtgtggcccacaccgacatccagaaggagatgcgtcagtcgtacctcgactatgccatctccgtcatcgtcgaacgagcccttccggatgtgcgcgacggcatgaagccggtgcaccgccgcatcgtgtacgcgatgtatgacggcggctaccgtcctgatcgcggctattccaagtgcgcccgacccgtcgccgacgtgatgggcaactaccacccacacggcgacgccgcgatctacgattcgctggtgcgcatggcccagccgtggtcgatgcgatacacgctggtcgacgggcagggcaacttcggctcggccggtgacgacccgcccgcagccatgcgttacaccgagtgccgcatgatgccgcttgcgatggaaatggtgcgagacatcgacaaggacaccgtcgacttcgtgcccaactacgatggccgtacgcaggaacccaccgtgttgcccgcgcgcttcccgaacctgctggccaacggctcgtccggcatcgccgtcggcatggcgaccaacattccgccgcacaacatgcgcgagctggcggaaggcgtgcattggacgctcgatcatcccgaagcgagccatgaagagctgctgaacgcactcatcggcatcatcaagggaccggacttcccgaccggcgccacgatcctcggccacaagggcatcgagcaggcgtaccgcaccggccgcggcctgattacgatgcgcgcggtggtcaacaccgaggagatcaagggccgtatgtgcctggtggtcaccgagctgccgtatcaggtgaatcccgaccgtctggccgcttccatccgagaaggcgtgcgcgacggcaagatccagggcatcgccgacatgcgcgacgagacgtcgggccgtaccggccagcgactcgtgctcgtgctcaagcgcgacgccgtgccgaaggtcgtgctcaacaacctgtacaagcactcccagctgcagcagacgttcggcgcgaacatgctcgcgctggtcgacggcgtgccgcgcacgctgagcctcgacgccttcatccgccattgggtgaaccaccagctcgaagtcatcgaacgccgtacccgttacctcaagcgcgaggccgaggaacgcgaccacatcctgcagggcctgctcaaggccatggacgccatcgacgaggtcatccgcctcatccgctccagccagggccgcgaggacgcccggccgaagctgatggagttccttgacatcgatcaggtgcaggccgacgccatcctttccatgcagctggttcgactggccaacatggaacgccagaagatcatcgacgagcatgaggaactcatgcgcaagattgccgactacaacgacatcctcgccaagccggaacgccagcgtacgatcgtcggcgacgagctcgacgagatcgtcgcgaaatacggtgacgaacgtcgcacgaagatcctcccctactcgggcgagatgaacgtcgaagacctgatcgccgaggagaacgtggtggtcaccgtcacgcactccggcttcatcaagcgcaccaaggccaacgaatatcgcgcacagcatcgcggcggcaagggcatcaagggcgccaagctgcgtgaggatgacgtggtggatcacttcttcctcacgtccacgcataactggctgctgttcttcaccaacaagggccgcgtctaccgcatcaaggcgtacgagctgcccgaaggctcgcgcgattccaagggccagcacgtggcgaacctgctgcagttcggtcccgacgagacgattcagaccgtgctgtcgattccgaactacgaggtcgccaagtatctggtgcttgccacccgcaccggcaaggtcaagaagaccgcgctggccgagtacgattcgccgcgtcagggcggactcatcgcggttcgtctcgcggccgacgaggagaccggcgagcccacggacgagctgatcggcgccgcgctgtgcaacgccgcagacgacatcatcctcgtctccaagcagggcatgagcctcaagttcgcggcggacaacgaccagctgcgtccgatgggacgccagaccgccggcgtgcagggcatgaagttccgcggggatgacgaactgctcgccatggacgtggttccggaggactccaagcaggacctgctcgtggtcaccaatgagggcttcgccaagcgcaccgcgatcagcgaataccgactgcaggggcgtaacggcttcggcgtcaaggcggtacagctcgccgaaggtcgcggatcgctggtcggtgccctgatcgtaagcgaagacgatcaggtcatggcgatcatgaagtccggcaaagtgatccgttccaacgtcaccgaggtcaagcgcaccggccgcaccacgcagggcgtgacgctcgctaagcccgacaagggcgacgagattatctccatcgcccgcaacgaggaaaccggcgaagacgaagtcgagacgacggatgatacggctgcggccgcatccgcgaccacgtctcccgatacggccgaaaacactccggataccacggatagcgtcgcatccggcagtgattcgggcgcggcatctgacgagaatgtgaacaacactgatgacgaggcataatcgtctcagaaaactggtagcctcggctaagagtcatcggggaacgacaaggagcaacgatgagtgacaacctcgaacccggacggaccgacatgttcgtgcccggtccgcatgacaatgcagaaccgcacgaaggtgtccgcgaaagcgcccctcgggtcgcgcgctctatttccaaccagccgcagtcggagagcgagccgcgcgccaacaaaacgcgtgcgtccctgcgttcaccgcgccgttcgacgccgcgcgcccgccgcatgaacctgtcgctgacccatgtgaacgcatggtccgtggcgaaggtgacgttcatgctgtcaatcgccggcgcgatcatcgaagtgcttgccgccgccctggtctggctgctgcttgacgcggtcggcgtgttcgaccagctgaacaatatcgtctcgtccaccggtctggccgccgacagcctgaacctgtccagcgtgttcagcctgtccacggtactgtcggtggtcaccattctggcgatcgtcggcgtcgtgctggtgacgctccttgccaccatcatcgcgctgctgtacaacgtgatcagcgcgctggtcggcggcgtacatatcactctgggcgacgactgatccaatcgaatccctgatacatcccgttacgaaccccgcggaggcaacgcccgcggggtttgtatatctcatcatcgccggcgcaggaaaagactacaccgccgcttcgtggaagccgtccgctcaggccttcaaggaggccaaggttcgtggcgttgccgctgattggcgacagcgccacatgaccgcgttgccgacgcgggttgtcagcacatgacgacgaataatgggtagttcccgatgctcgggagcccccattatgttgttgataggaaaatcacgctctcaaaactcgcagatacagaccatttttgttgaattcggccctgtatctgcgagttttgagagcgtgagctcgcgataatcaggccgtgaacctcaccgaagcccatgtgaccggtggcaacgaaacagtcatccgaccctcatcaagcgcggcggatagcggctgcaaggtgacgccgtccggctcgtcggccgtattggtgcggtagatatcgtcgctgggcagcatctgcgagctggtgacggacggccactcccccagcctaggcaacgatgtcaggtcgattgtcacatcatgggcgttgtgctcgtcacggttgacgagcagaatcatgccttcgcgagtcttttgatcccaagtggccaccgcgaccgtgaagagccgtaaggccggcagcggcaccggttccgcatgggcacagtacacggacgaactcgccaccgcatcgaccaccgccgacacgaaggccggtgagccgcagtacgtgaccaccacgttcaccgtgcccgccgacgccgcgactgaaggcgctctgtggctgagcttctccgacatgggcctcgccgatgacgccaacggctacatcgacgatgtggtgctcgttcgctccgactccaagccgacgctgaagaccaccgcgttcacgccgaccgtcgccgagggtgaaaccgcctccgcatacgtggagctcgacggtcagcccgccgccaaggaggtctccgccaacaagaacgcaaccgtcgacgaagtggccaccgcactgaaaacctcaccgccgcacagaacgccctggccgagaagccgaagccggcggccgtcgaatcgatcaaggtggccgcgaagcccgccaagaccgagtacacggtcggcgacacgttctccgccgatggtctgaaggtcgtcaaggtcatgtccgacaagaccgaaccaggaaagaagcctggcgcgcagaagcctgccagtcagcagaacgtctgtccaagaccggtgcctcggtggctggcgtggccggtttgcgtgcctaagtgcgcgccgaaacgacgatcgtgcgcacttaagaacgcaaacagagccatttgcgttcttatgttcgcgcacttgtcgtttcggcgcgcacataggaacgcaaaccggccgtacctgctgctgttgcgttgctgcgccgtcaagccgttgtgccgtcacgatgtcgctgccgtccggggaacgccgaaagacgcgaaacgggcctgcggcaaatcatgccacaggcccgtttctcaatgccggaccacgccggctaaatccgtgatctgcgaaaacccgcgaaaatcagcggtgggtggtgccctcgtaggtgtcgctccacgtcagcgacgccacgccgtcggcgatggaaatcggcatctgtacgatcggcgagttgccgaggtcatgctcctgccagcggtcgccgatgaacaggaagtgctcgctgttgtacgggtcgtcgtccagcggcaccacgatatcgacctgcgaatcgtaggtcttcgcaccctccggcgcgaacagcttccactcgctccacgggccgtgcaggtcggtggcggtggagtacttgttgtcgttggtgtcccagctggtcagttgcgagccgaaccagtagtacaggccgtccttcttgatgatggtcggcgattccaggccgtatgggtagtcggtggcacgctcacaggcgacgtcctcgacgatggtgaggtagtcgtcggcgagacggtaaatgtgcgtgccatggtcgcggtcctcgctcatgatgtagccgctgccgtcctcgtcctggaagacgccgatgtcacggctcaggtagccacgccacgtgatggtggtctggaatgcgaacgggccggttggggcgtcggccacggcgacgccgatgtgcgcgtatccgtagtcgggcgtttcggcatgaatatacatgacatatttgccggtggcggggcaatgcagcaccttcggccgctcgccgatacggtcggcggcgagggcggagccgtcttcttgcacatcaagtacgatgccgtggctgcgccatgcgatgaaatcggtggttgtataacagcacacgccctggaacaaattgccgtttaccttgttctcgccatatgcataccaggtgtcgccgaatttctgcagaccgatgccgtgcagctgggcaacgtcgcccgaggtgtcgtgaggcagaaaagctccgaatctatcagccatgatttcccctttcgtgatgatctgctgttgattatctgtcgtgtccgcaactgcttgtgaccggttacagactgaaccattgtatcgtgaaaaccttgccgacatacggaagaatcggagtgcgcccggcggtggcgctccggcaacggccgcgtggggtcgtgcgttgcaatatgaggctctcaaaattcgcagatacaagggactattcgttattttcgccctgtatctgcgagttttgagagcgtggttcttcctagatcacgccgattggcgctccgcgatggtcgtcggcagcagctgcacgtaatgcggctccacgatgtcgccttgcagcatggacagcaacagccgcgacatcgtctcgccgtgcagctgcgaatcctgccgcacggtggtcagcttcgggttcgccagcagggcgattggcgaatcgtcgaatcccgtgaccgcgatgtcgtccggcacccgatacccgaaccggttcaactggttgatgacgcccagcgcgatgctgtcgttggcgcacacgaatccgtccagctcgtcaagcatgggttggaactcgaccacggccatttcgccgctggtgctctcccagtcgtccgcgtagtagacgtggcgttcgttgaaccggtcacccatcgccgccttgaagccgtcgaagcggttgttcgacgatggtgagtatccggggccgcacacgtacaccagcttggtcctcccctggtcgagcaggtagcgcgtgatgtcgcgctgcccctcggtgttggtgaagtccacggccgggaacggcaggttctcgcgttcgctgacttccgagaggaccaccggccgcttgaccgatgcgaacgtgttggcgagcatgctgtcctcgctcagtgagaacagcaggtacccgtccgaaaagtcgctttgcaccagctgcgcgatgcggcgcgtggagtcctcgctgttggcgatcagcgtgaccatctggtagcccgcgtcgccgaggacctggttggcgccggccatcgcccttgacataccggcctgcgcgatggtctcgttcgattcgacctggatgatcagcgcgacggtgagcgtgcggcgttgcgcgagtgagcgtgcggcgttgttcggcgtgtactgtgatttggtgatggctgctgcgatgcgttcggctgcgtcctgcgagacgtgggtgttgccgttcagataccgggagaccgttccgtacgatactcccgcgagacgggcgacgtcgcggatggtcggttttttctgtgcatcgtccatggaatccatggcatcggtgtttgcttcgtgttgctggatattcgccggttgcttatcgctgttctggtctaccggtgtttcgttggaacgtgcagacgacttcgtccgagtgcggttcgccagacgccgggtcggtttgccgctcgttgatgctaccttgttcggcgcgtgagtagctgttgacatcattgttcctttacgcgtgcggccgtcgtcggacgaccgcgtacaggttcgagtatacgcagatgatgtaaacggtcacaaggggtgtctgtcgttgtgccggccgtggcatgcggagcctctccgcagtcgcggtccgccgcccgaccgccgtgtggctcgccatccgtggctcgcctgtgtcgacgcattccgacatggccgcgcaatctgttgtatttcgcgttcgcgtttagataatgcggggcatagtcgtcctgtcggttcccgcgacgcgagtacattgaaatcatgaccgatccgctgcatatccaactcgccgcgcgccccaccgtggacgactggcagcccgactgcgtaatggatggctaccagcaggcgacgatccatctcggccatgatgacgaaggcgatatcgtcgccacattcgtgcgccgggacccctcgaagctgcccatgagcgcgcgatggaggcgtcagcggttcgcgctgcgcgggcaccggctcgcggtgatgtacgtgcacgggtggaacgactatttctaccgccgtcacgaatccgagttctgggaatcgctcggcattcccttctacgccgtcgacctgcgcaagttcgggcggtcgttgcgggatggccagacccctggatatatcgaggatctgcacgattatgcggcggaattcaacgccctacgcgacctggtcgtcgccgagcagggcgagcaggtgcgcatcctgctggtcgcccattcgcagggcgggctgagctcggtgctgtggctgaattcgcagcggccgcatcacgtcgaggcggtcgcgctggactcgccttggctggaattgcaaggcaaccgcatgttccgcatactgtcgacgcccgtggtgcaggcgttccagctgggcggcggcaaaacggtgatgccgatgcgcgatccggggttctacggccgctgcatcgattgcgagaccggcggcgactgggattatctgcgccatccgctggtggacccgcagcgtttctttccccgcgccgggtggatgcgggcgatctacaatgcgcaggccgaggtgtcgcgccggctcgacatccgcattcccgtgctggtgtgcacgtccgaccggaccatgctgcagcccacatgggatgaggcgatgcgcgaggcggattccgtgctggacatcacggcgattcgccaggcggcgctcaacctcggcgatgtggtgacgctggcgacgattcgcggcggcctgcatgatctgagcctgtcgcggccggccgcgcggcgtaggtatttcaggatcgtggccgactgggcctctctgatggcgtggcggagggtgattccgcctgcgcatctgcgcaccgcgttggacgcagtcgcggcggccggcagtcatgtcggtggcgtgaatcccgatgtcggccccgacgcaaaatcctgaggtcccgcaacggctcgcggccggcgtccagctgcgagcctgcgcaggtcacgccgactgccgcaccaccagctcggtcggcaacatcaccgtacgcggcgagtcgatgccgtgaatctttttgatgacgatgtcggccatcaccttgccgcgcatctccatgtgctgatcgacagtggtgatctgcgggttcgactccctcagcatccgcgcgccgtggctggcggtaaaaagccatttctgccattggatttccttatggcggtttgggttagatgacgggcagccccttgctacaatgagagggcttataaatccgtttgttttaagcaaaaccccgagagtgacgcaacactcttggggtattttcatcagacagggaaccccgccaaacatgctcgaataaacaaaatcccggcagccaaaagcaaccgggattcatcaacgcggcctacgcgcccaacggcacggcctcctcacgcgcggtatcaggtgcgacgtctatatcaccgtcaccccacaacaccgtaccgagaccagcccgcgcagtagcgaacaccgcaggatcattcaacccagcgaacgccggatagccaaaatacttagccatatccaagacgccgctataaccatcgctgaacctgaccgccacacggtggccgtccaacggaacagcgtcagtcaccaaaacaacaccgtcacacatgaataaacctccttacctaagcggctcgatgtgtccgggttgcacatgggcctccacacacttccaattggactcgagatcctcacggtgtatttcagcccacgccaacaccaaacgttcctgtttcctaggcaaaccgcccttaatcaaatcgccatcaaacgagtacttagcccaatggccattatattccgcgtgaaaatgtttcacggggccatggtcattggcatacatgtaaatgacgataccgaaaaacctactgattcccggcaactatgccacctccttactcttacgccgatcatatcggctgaacattagcatttcgtgggccagccacgctataaagacacgtctagccctggcggattacattcaatccgccgaagtctcggaatcaggatcaagcagcttacgtggattagcaacgcgcaaagcgtcacacaatcgcagtgcagtatcaagcgacaccgcccggacgttgcgtttacccgtttcgatctgcgcaatctcaacgtgatgcacgccgctacgttgcgctagctcacgctgtgtcattccacgtttcaatctcaattctttcaatcccatggccctactcctaacttggattagagggcattgtagaccactcagatggcgcgggacaattccatgccggataccgcgccacgttggcgactcggcgacggttcggccttgcatgatatgaggttacggaatcccacaaagccccgagtgtgatggagctgttgttggcgctgccgaatctggcccgttcctgtagcagttccgtcagccgcttgttggcgtcaacgtattttttgcggctgtatgtcttaccgtcaaccttgaactcgtagctggcgtagatttttacggttccgtcggacagtctcttccggcgttcgacccgatatgggtagacgatgccgtttcttgctttgcgtaccatgattgcctccctgcctctcaccattctcagacattctcagacatccatttacctcttacttacggtttaagtacatcctaagtacggtgaaaccgttggaatgaagccgttttgcccaatcgctccaagtgccattctaccagactttctaactgttaatcggacggtcactggttcaagcccagtcgcaggagcttaggctttcaggccttttggcagtagggttgccgcggttgacgccgatggtgccgttgtggattacgcgaagccgttcgcgaaggtcggcaaggccacgttcacggtgacgctcaaggacaccgagtactccaagaccttcgaagtgagcgtcaaggccgccgacaagaccgcgttgaacaacgcgattgccgccgccgaaaagctgaccgaggacaagtacgagtccggctgggatgcgttccaggccgccttcgacgctgcgaagaaggtcgccgccgacgaggacgcgactcccgcccaggcggctgacgcgcttgccgcgctgcaggccgcccggaaggctctggtgaaggttgatggcgagaagcccggaccgcaggagccgtccaccaagcccgagccgcagaagccggcggtcaagccgagcccgaacggcaaggtggatgccaccgagctgagcggcctgagcaagacgggtgcctcgacgatggcgttcgccgtggccgcggtcctgctgctggccgccggtgccggcgtggtgctgctgcgccgccgcgccgagtaaggcgcgagccgccatcccaagattctggcatgtcgggatggccgccgctgagaaatcggtggcggccatcattccccgccggcatgtcgtgacgactgattgcatgggggcgcttgatgcggacgggatgctcccgagagccgccatcccggccgcatttttcgttgttgcgggaatcgcgctctcaaaactcgcagatacgggccgtttttgttggatttagccttgtatctgcgagttttgagagcgcggggttggtggcagcccgtgcctcatcccgtaaaggtcccgtttctggcctgcgggatgtgactttctccggatgcgggggcaatcgacatgatggcgacccggtgatcgcgcgccgcccccgttggcggggagctgtcgcgaagcgactggggtggccaaacctgctgcaggacacgaaaggcccgccgaaaccaatgcgaatactggtttcggcgggccttcgcgttatccgcgaatgcgcgccaaacgttacgcgcctacgcgatcacaggatgccctgcgcgaccatggcgttggcgaccttgacgaagccggcggcgttggcgccgagcatcaggtcaccctcgtggccgtactccttggcggcggccagggagtcggcgacgatggtctccatgatgttcttgagcttggcgtcgacctcttcgaaggaccacgacagacggtagctgttctggctcatctccaggccggaaacggcgacgccaccggcgttcgccgccttggctgggccgtacagcagaccgttcttctggtagacctcgatggcctccggggtggacggcatgttcgcgccttcgacgacgaccttgcagccgttcttcaccagagcttcggcggactcgccgttgacttcgttctgggtggcgcacggcaacgcgatgtcacacggcacggtccacacgccggagcaaccctcgtgatactcggcggacggcacgcgctcggcgtactccttgatgcggccgcgctcgacttccttgatctgtttgaccacggccacgtcgatgccgttcggatcgtagacatagccgttggagtcggagacggtgacgaccttggcgcccagctcctcggccttctgcacggcgtagatcgccacgttgccggagccggagaccacgacggtcttgccctcgaaggagtcgttcttcagcacgcgcagggcttcctgggtgtagtagcacacgccgtagccggtggcctcggtgcgggcgagcgagccgccgaactccagacccttgccggtcaggacgccggagtactcgtcgcggatgcgcttgtactggccgaacaggtagccgatctcgcggccacccacgttgatgtcgccggcgggaacgtcggtgaactggccgatgtggcggcacagctcggtcatgaacgcctggcagaaacgcatcacttcagcgtcggaacggcccttcgggttgaagtcggagccgcccttgccgccgcccatgggcagcgtggtcagagagttcttgaggatctgctcgaagccgaggaacttgatgacgccctcgttgacggtcgggtggaagcgcaggccgcccttgtacggtccgatggcggagttgaactgcacgcggtaaccacggttcacctgcaccttgccctcatcatcggtccaggccacgcgaaacttcaccacgcgctccggctcgacgatgcgctccagcacgcctgccttctcgtactccgggtgcttctcgaccaccggctggatggtctcgaacacctcgcgtacagcctgaaggaactccggctggtcgccgtcgcgctgttcgacctgagcgtagacgcgcttcacgtactcgtcagtgagcataattctccccttaatggttgggttatcaataagacggttttattgtaggtgcggtgtcaaggggcgacaagaaattgctcaggatgtggcgcggatgtgtgcgtcagctgagctgcagcgtttcggcgacttcgtcgacgatgcggtgcatggcctggcgcgcgttgtccggactgctctgccagatcgcttgggcgacggcgtcgtgtgcgtcgagggcttccggcttgggcttttgcgggtacatgtgcagttcgacgcgtccggagagcacggtggcgatgatggtggatagggaagcgaacatctcgttgccgctgttgcgcaagatcagcgagtggaattcgatgtcgagcttgtggaattcgtcgagcctgccgttctcgccggtgtgccggagctccgctgcgagcagggggagccgcgatttcacgtcgatcggcgcgtatcgggcggccgaggtcgctgcggccgtctcgatggcgaggcgcagttcggtgagggtgcgcagctgctcctcacggtgtgtggagtgcagcttccaatggatgacctgggtgctgagcgcgtcccactcctcgaccggttgggagacgagcccgatgcatcgacggacggtgacgactttggctgtttcgaggcttttcgcgacttcgcgtgccacggttcgcgagacgtcgaaccggcgctggaactcggcgtccccacgacggccaccgcggcggcgctttactcccggcaggcttcgcgcggcggcgccgacgacatcctgcgtgtggtctccacgatgcgcgcccaattcggcggccacgtgacccgtgcctgaagcggggcagccgcggaatgccacgagaatgatgcgatagtctgggaggtgacgatgcgcgggttgcaatccgcgcatccgggcgcggacacgagcctgcgcccgcgaatcctctcaccataggaggcgtcatgatcgatggtttcaagaagttcatttcccgcggcaatatgattgacatggcggtcggcgtcgtcatgggcggtgcggtcaccgccgtcgtcaatgcgatcgtcaaccatctcatcaatccgctgatcgccatgatcttcggcaagccgaacatggacggtctgcttgcgttcacgttcaacggggcgaccgtgtcggtcggtgcgattctgggcgcattgctcaatttcctcatcatcgccgtcgccgtctacttcttcatcctggtgccgatcaacaagttccgtgacatgtccgatgcgctgctggcgaaggcgaagctcaaggaaagtgaggccgaggacgccgacgaagtcaaggaacccgagcccaccgccgagcagcagacaatcgcgctgctcaccgaaatccgcgaccaactggccaaagcctaaccagaactcgcaccaccgctggcggggctatcggcgagccgactgggcgccggcaatcgcatgctcctagtcggcgaactcgctgttttccggggataatgcgtcatgctgcgcgggtaccgtcaccgtgtgcgggggcgcacagcgtgacggcattccggaaccattgcaatcactgggttcttgaagaatgcgtcaccgtgtgcgggcgcgcacggtgacggtacccgcacagcgtgacgctctgatgtcgcgaatcgcacctgattccgttctcataggtggcgcgcacttagggacgcaacaacgggttatgcgccccgcggccagggggtggccgaccatgcgaccttcgaccgcggggcacgcgctccgtcagctccgcttacgacggaatgtggcgatgagaccgcctccgatggcgagcattgcggtacaggtcagcgcgaccaggacgctggcaccagtatgcgacaactttgttttgccgttgtctgcctgttgcccatttgtcttgtcatccggcttctggtgggctgcttgatccgtctcctcgtctggtgccggcttgggtgcaggttccggcgtgggctcggggcccggcgagggatcaggctcaggctccggagtctccccaccttccttcgcctgcacgacgaccgtaaaggtcttggaggtagtggctccctgactgtcggtgacggtgatagtgacgtgataggttcccggagtatcgggatccacatcatcggcggtcacattcgccgcagcgagcggcatgtcgccatcctccgcgtcgtgcgcggtcacgccgtcaagcggatcaaaagcgtcaccgaccgtaatggtccggtcactggcggtgatgacgggtgccgcgttgatcgttccggcagcacgcggccgaatcttcagcgtcgtcaacgaatgcggcgtgacggtgaccgtcggcgtcgccgcatcgaacgtgacgctgctgtcaacgggagtcacattatcttggttttccaacgtgttctctgcgttgattgctgcgtccatggtctgcacatccgcgactcggccagacagatcctgcccgaaattcaacttcagcgtgcggccgagcgcgcgatccagattgacgatgatcacgcgcagattgccatcatcatccttggaaaccaaagcagacagagatgttgcgccattgcccaacgtgggcgtcgagccgagcgtcgaagtcagcacgctgtcgccgatgccattgccgagcatctgcagggcatacgcgctcggcgtcaggaagaacccaaaccgcccctcgcccgtcaccgtgcttgcgccgtcttccggcacggcctgaataaccgcctgctgggtcgggccgagcgagtcggcgccgctgctgtaccagtcgatcaggcagtgcttctgaatataggggctgccaagccgaacatattccagcgcgaccttggcgatgtacagcgcgtgcgattgcgaccggaccagcgcgctggtatcgcggaaaatgccgtattcgctgatgaccggcaccttgcctgccggcatgagtctcacatactccttgacgcggttgacgcccgccgtctcggccttcttcatcgcgtcgtcgtaccatgcgcccgcggtggctcccgtgggggttccggaataagggtggatggtcatgccgtcgtaccactggttcgcgttcaggttcgccatgcgggtgatgaaccctgtggactcgtaactggtgtacacgttcgccgtgtgccgtgtgccgtccgtgcgctgttcggccgtgttgatctggtcggtggtgttcttgatggccttcgatatcttgacgaacccgtcgcggtcaacggtgtagctgacataaacctgctgtcctttggccggaatcgcaccatgcacgccgtctccgaacctcagcgcgcccgtgctgtaatcgacctgcacgactttgtcgccggcaccggcggtctccaagtcgtccacgatgcgccactgttcgttcgactggtcgttgccgacccatacgctgacgctgcccttgttgacggccacgaacgacgggtcgtcgacgatcgcgccatcgtcgccgttcattttcgggttgacgttggcgtagcgcatgtaacgggtcagaccggccttgccgtcgctgaccgacgctgccttgttccaatcctccaggctcacggcgtactgcttggtgaagctcgctgtgccgccctccgtgtacgcctgctcgctgccgccgctcaccgcggtggtccagtagccctgcgaggcggtgccgtcggagttggcccacgcctggttcatttcgttgccgatttcgaaatagcgcacgttgtacggctgcgggtgtccgttgtctgcgcgcaccttcgcccagtcgatgccgccgttgggattggtgccgacctgcgcgttcagatattcgatcagatccgccgcgtcctgtgcgttgccgcggccgaggctgtacacatagacgatttctgaatcgacctcgtccgcgaacgtcgcgatttcaccgatgccgaaattcggttcgatgccgccctggccggggttgttgtagaagccgtgtatctgcttgagccgttgggcgcgcggaccgatggtggtcttccagttgaacaggttggaaatcgtgcctccggggtagcgaatcgagccgaatccgacctgcttgtacagtgcggtgaagtcgtctttcacgcgcatcgtatcggggtcgaaactgccgtacccgttgaaggcgtaccgatgattgacgccgaagatggaagcgctgtcgaccgtgcgctccacggtgctggggtcggccgtgagcgtgatcggtacatgcgcctgatacgcggtgatggccgtctggagcgccgtgcccgcggcattcatcgccgtcatccgcgcgacggcgctgccggaggtgttgttcatggcgttgaccgcgttgcgttttgccgtggcgagtgcttgcgcctgcgccgacgcggcgtcgacctctcccgcggccagcagcgcgtcggcctgcgagaccagtgtgccgagttgttttctgacaagggccgtgccttgctcggcgtaaatcgcagctgcctggtcgtcggtgagcgtggcatcatatacgcggatgtcatccacgtcgcccttcatcgaatgcgggtccatggtgccgatgttcttgtgcgagccgaccagcagcgcggtgacggcgttgacggccgaggttcccatgttcttttcgctgtcgagcgcgccgttgacatagaacttgaccttgtggctcgtctggtcgaaggaaacggcgatatgctgccatccgccgcgtgccaccgtattgttgctgagaacgtcggtcgcgttgacatacgtgtggtactggttggacgggcgcagcgtaagcagggagcggccggcgccatcctgctgcaacagcaccgcaggcttgtcgcctgtcgggtcgagcgtcgtatcgtaccggtaccacatcgcgaatgacgcgttgccggctccggtgttgacgtactggttgattttcatgtagctggacgcgcccgcgccgaagtgcagtacgttgccgaatacgccggaggggtcggcgatgatggagatgtcgtcgccgatgagttgggccgttgcgctgctggagccgccgttgttggccgcttcgcggtcgccggccgcggtgttctcgaagttccatgcgcctcgaaggtttgcggacgcggtggttgctggtgcggtggcgtcggcgtcggccgcataggctgcggctcccggcgacagcgccatcgctgctgtggcgatggccgccatgattgagcgccagagcttgccgctccgacggtgtgatgtgatatgcgtcattacatgctctctgcttctgtttcggggatcactgccatgtgatcgttggggtgagccttgcctctgtgtgaaggtctgctcaattctatcaatgcgattccgtgatgcaagtaacggcggggcgctgaaccggtgagagccggctctgtgccatccgcgtgccattagccctgacgattttggctgattcgagatggaaacgagcagaaagtgcaaatagaaaaaccctcagaatcagcttgattccaagggttctgagagtggagctagccgggttcgaaccggcgaccctctgcttgcaaagcagatgcgctaccagctgcgctatagccccgtgattccgccgttgcggcgttgtcagtgagaaaaaaagagcggctgaagtagccgctgcaattttcctgtgggcccgggaggacttgaacctccgacctcatccttatcagggatgcgctctaaccacctgagctacgggcccgatccatacgcttcaaaagcgcacgatgaactagaataccagaattgccgtatgtgtcaaatccagtcggttttttgtggctttcggcgtgtcgttatcgtcgttgtgtgtcttcacatggcttcctgcgccgacaatcgcgggtgcgccgataagggacatgggttactgtaggtgatggctatggtgatgtctggcgcatcggcggccagaccgacttcctgcgacgaaagggtgtacagtgcagtatcgatactgttgtggcgatgaagacatgtcattcgatctcattccggaaccgcaatccgtgacattgaacggggaggctgccgattcggatgatgccggagctccggtacccgtcgcgttgccgctcgtaggccgcatctcggaagatcgcgacatcgatgacatcgccggcgttttcccgacccagcttgccgatgatatcgaagcggcgacgggcctgcgctgggacatcgccagcgatgtcatggtggccggactgcccgcgccaaatgccgcgactgcgcacccggttccgccacacgcttcatgctggaagtcgttcatcacactgagactcgaccccccatccctggagccgcaggaataccgcctgaccatcgcacgctccggcatagacgtcgtcggcggcgatacggaaggcgtgcgcaacggcgtgcagacccttcgccagatcatccgtcagtgcgcgccggcgctgcctcgactcgtcatcgcggacaaaccggcgtacaaggtccgcggctactatctcgacgccacgcgcggccgcgtccccacgctcgactggctgaaaacatgggccgaccggctgtgcctgtacaagtacaaccagcttcagctatacatcgagcacacgttcatgttcgacgatctgagcgagacttggcgcggcaccagcccgctcaagcccgccgacatcatcgcgttcgacgaatactgcgcgcggctcggcatcgagctggtgccgtcggtctcgactttcggacaccagtacatggcgatgcgcacgcgcgagctgcgccatctcggcgagtttcccgaggacgccgaccgtcagtacggtttcgtggagcggcagcgtcaccacacgctcaacatcaccgaaccggagtccctcgcgttctcgttcaagctgatcgatgcttacatgcagctgttccgcacacgcaagttcaacatctgcggcgatgagacgttcgacttgggtcgcggccgttccaagcccgaagccgaacgccgcggcgtggccgcgatgtacgccgacttcgtatcgcagctgtgccgtcacttgtctgagcgcggccgcgatccgatgttctggggcgacatcgctgtggagatgccgcagatcctcggcctgttgccggataacgtcacgctgctcaactggttgtacgcgccgggcatcggcgaagacaaggtacgcctcgtcgcgcaggccggggccccgcagtacgtgtgctcggcggtatggtgctggaatgcgctgctgccgcgcctcgacgactcgtggaacaacatctcccgactcgcgcgctacggcgtgaagtacggtgcggtcgggtacctggtgaccgactggggtgattacgggcatgtcaacgatccgcgcatggcggtttccggcatgatattcggcgcgcagtgcgcgtggaatccgatggctcatatccagggtgaggccgggtgcggcgacggcgaagaaggctctgctgccggttatgccgatgccgccgccgatgccgtccgtgagaacaaggccgccgcggacggggattccccggcaccgctcccgtcgagctcggaaagcgacgattacaccggtggcgcggccgacgcgattgcgggcgcgccggccggcggcgatgggtcgtgtgccgagatgtgccgtcgcgtggccgaggtcgaatacggcgaccgttcgggcggcatagtcgaggcactgcgagatgccgcctgtcgtgtggcgttcagctgggatgacatggtctggtactgcgagctggatgaaggcgacggacggatgaatcgcgatgccgcatcggcgatgcatctcggcgtgcatgggttcagcggggaatacgggcgggagtgggaggcccgactgctgggcagtaccgatcttgatgaggctcggcgcacgatgctgcaagggctgtcgccgcatatcgtccgcgcggccgaggcgaacgaggcgctgctgtgcgacgccatgcgactcggcgccgccgccggtcgcgcatcgcgtttgggtgcggctcggcgtgatgtgccggcgatgctggccgccatcgaggggcagcgctggttcaacttggtcggcttgtgccttgcgcggcggcatgacgtcatcacggtcgatgccggcgatatcgcccgcgcgtcggccgggttgatcgaaccggacgcaggctcttccgcagggccggaagccgtgcagtatgtctcgattcgagtggcacgtggtctggagcgctggttcgagacctactgcgacttgtggcgttctgtcagcgcggaatcggaattggcccgcatcgcctccatcgtgtggcgctgtgccgacgccctgcgttcataagctcaagcgcacatcagaggcggggcgtcgcgcggtagtggcatgagccggtcgttgttgccgtgccggcgctcgctggctgagacggcgcgaacatgcgatccatgccgggtctcatatgtgagatccggcatttcgttgtgccgcaaggcgtcgccgcctcgtgcagtggcgtttttcaggctctgacagacgagcttgccgggtatttgcgcttcaagggggtgattttcggtctccggaacatctatctgcattccaaggggttgcggcacagaggcatccgaggtatatgagccattcacttattggaatgacgcggttctagcagtgttcctacttggtcaccaaccccttgaaacgtagatagatgttcgggaagtcgaaatcaccccctcgaaatgcagatagccgtgtaatccacgcctttcgcgcaatattcgtgccgctcagggcaccgacatcgagttttcagctctcgtcgtcgggcagcgccatgtcgctggagccgaatcgcggcccgctggtcgattcgcgctgcactagctgcggcggatacgcggtgtgcgccggaagccagtgtttgctgctggcactgacgctgatgagtcgcagcgcttcatgggcgatgagccggcacggcgggagaatcgacgagagcggcgggtcggcgatggccgccgcgggggagtcgcccgacccaatgaccttgacctcgtccggcacacggattcccagttggttcagcgccatcagcgctccgatcgccacatcgtcggtggcgcagatgagcgcgttcgggcggttgcccttgtccccgaacagtctcataacgtcgtgatacccgcgcttcgcggaattgtcgccgaacgtggtccaacccggttcggtcatcaggttcatgaccctcgttgacgtctgcaacgtggcgaacagctcggcggcgctggcggagttgacgttgccgctgaggaatgcgatggagtcggcgttgtactcggcaaggtgcgaaagcatcagcttcatggaggcgctttcgtcgacgccaacccagttcacgtggaaggacgtggagtggccgaacgcctgaaccagcgaggtcatgccgacgtagtcatccaggaacgctgcggtgttggcgtcttgcggcggcatgaccaccagcccgtcgacccggcgggcgagcatggcttcgatgcgttccgcctgggttcgctggtcgtcgccgaggcctagcagcagctggcgtcccgagcggttgacttcgggctccaactccgcgagcagtcgggctgccagagggtcggttgggccgggcatgatgaggccgatggtattggtcgtgtcgctgcgcagtgcgctggcggcggagttggcctgatagttgagctgttccgccgcgtcccgcacgcgtttcgcgatgttgtcgtctttggtgcggcgccctgaaagaacgcgggaggcagtggctttggatacgcgcgccaatgcggcgacgtcggtgatggaactcgttgagctcatcgttcatcacctcggattgtctgcttcgattacttctgccgggcaccgcgtcgctgcccgttgtatataggatacatgaacgcacattgcgcttattggtcgccgcgatgccgtatgggcgtgattattgccaatgtttccagtggacagacgtaatggtttctgtatagatcataccatttcattacaaagttgagaaatcggtttccgggtttactaagcggattttagggtgtatagtgacggatgaaagaaacgatttgctcgcgatggtgtcagcaaatcaccaacccatccagcggtggatggctcagcaccgaggagatgctatggtcgccgatattgacgggttcctgccggacagcgcgtttctgctcgacgttcccgccaccgattggaaagatgccatccggcttgccggcaaaggactggtggcggctggtttcaccaccgacgcgtatacggatcagatgatcgagacggtcgagaaaatgggcccgtacatcgtcatcgccccgggtctcgcgctcgcgcactcccgcccgtccgaggccgtgctgaagaccggcctgagctgggtgcgcctgtccacgccggtgaagttcggcaacaaggccaacgacccggtatcgctggtcatcggtctggccggtcatgacgagaacgagcacatcaccgtgatgtccgccatcgcctcggccctgatcaatcccaagaagaccgcggcgctcgccacggcccccacgccggaagccatccgcgacatcctgcatcaatagcagggcggcgcaacccgagccgggccgccggcgagcggcacacccacacttccataactgaatccaataactgaaacccaatggctgcgcggcagtcattccaacgaaagaaacgagggaatcatgaacatcctctgcgtatgcggcaacggcatcggcacatcggtgctgttgaaggtcaatgtcgaatcggtcgcggccgaccttggcgtcgatgtcaatgtcaccacctccgatgcgggcagcgccaagggcaccgccaacatgaacgatctggtgctcacctccgccgagctcgcgcccgagctggaaggcaccaccacgcccgtcgaagtcatcacgaacttcatggacaccgacgagattaagtcggtgctggagaagtacgccgactgagccgctccccgttacggcctgcgtgagatgccggccagaaaccataacaagaaaagaaggaatccatgaacgttgtcgttcaagtgctgaatttcatcagccaggaaatactgaatgtgccggcgtatctgattggcatcatcgcggccatcggcctgatcgcactgaagcgcagcgccgggcaggtcgtgtcgggcgccctgaaggcggccatgggctacctgatcctgggtgccggcgctaccgtcgtcacctcggctttggccccgttcggcgacctggtgctcaagtccaccggcgcgcacggcgtcgtgcccaccaatgaggtcatcaccgcacaggcgtccagccagtacggcgcctcctcggcgtacatcatcgtgctcagcttcatcgtgatgctgctgctcgcgcggttcaccccgctgaaatacatcttcctgaccggccaccacatggtgttcatgtccaccatgctggccgtggtgctgtccgtgggattcggcacggaccaccagctgctcatcgtgatcatcggcgccatcctcatgggcgtgatcatggtggtcatgccggcgttcgcgcagccgttcatgaacagggtgaccggtagcgacaagctgtcgatcggccacttcaacaccctcggctacattgtctccggtgctgtcggcgccggcgtgggcaagaagtcgaagtccactgaagacatcaacttcccgaagggcctgagcttcctgcgtgactccatggtctccaccacgctgctcatggtcgtgctgtacctggtcttctccgtgtgggccgccatcgtgctgccggccaaggaagcgttcaagatcttctccaccaaccccgacaactacggttcgttcttcatggccgcgttcgcgcaggccctgcagttcggcatcggcgtgagcatcatcctctacggtgttcgtatcatcctcggtgaactcgtccccgccttccagggcattgcgaacaaggtcgtgcccggcgcccgcccggcgctggacatcccgatcgtgttcccgtacggcgccaatgcttcgctgatcggcttcctcggctccttcgtcggtggcctggtggctctggcgatcatcgccgtgtggctcggcccggtctggggcgtcgcgctgatcctgcccggcatggtgcctcacttcttcgatggtggtggtgctggtgtgttcggcaacgccacgggtggtcgtatcggtgccattgtcggctcgttcatcaacggcctgctgattaccttcctgccggccgtgctgatgaccgtgatgggcagtttcggtctggccaactccaccttcggtgacgccgacttctgctggttcggtacgattaccggcaacatggctcacctcggtcctgtcggtggtgccatctgcctgctgatctttgccgcggtgctcttcgccgccgcgtggatctggcaggtcaaggtcgtcaacaccggctggactccgggtgccaagcacgccgagtacatcgagcaggtgaaggccgaggagaaggccgccaaggccgctgctcgcgccgccaagaaggccgctgcggaagcgtgatactgttccgccgccgctgagcgattatgcgggagcgtgagggtgcgagtgccctcgcgctcccgtttttgtgtgtgggaaggcgtgagatcgcgggtggtttcgcggagtgcgcagtgttgtgctcccgctagcgggagctgttgagcgcagcgagactgagggtggttctgtgcagtggctggtcagaccacccccccagtcgctgcgcgacggcccacgccagcgggggcgttgtattccttgcctcatactgactgggggcagcgtctgcgacaatggctcgtatgccattgcccaatcagcgtcgtcatgcccgagaagcacccgcgtccgcctcaaccgccgccgcgtcgaccgtgcttgaggtggacggcctgcaattgcatgtgacgcgcaagcgcatcaagaacctctatctgcgtatcaagccgcctctgggaactgtcgaggtgtcggcgccgatgcgcatgagccagcgtcagatcattggtttcgctcatgaacggcactcgtggatcgtgcaacagcagcggcgtatggccgaggcccgacggatgtcattgcggcaggccgagacgttgacgcccctccccagcgctcccgccggtgatggagggcatgccggtgtcgatggccgccggggctgcgatcagccgcagctccccatgttcgaccgttcggccatgtggaccgatgagcgcaaacatgccgccgcggccgcgatcgatgccgcgcttccggggctgttgcgcaagtgggcgcccatcgtcgggcgttcgccgagccatgtcaccttgcgggtcatgacgtcgcgctgggggtcatgcacgccgaaaaccgggcgtatccggctgaatcttcagcttggtctgatggagccgcgatttttggagtacgttctcgtccatgaaatgacccatctgtgggccaatggtcacggggctgattttcagcggcggatgagcgtttatctgccgagctggcgtgaactgcgccgtgaactcaacaagcgcgtactgctgtgaaacatatcgtgaaacatgctggccgacatgtcgcggcagcaaaacaaatgatggcggcggctcaacattgccactgaaccgtcgccatcattgatgtgcatcttttgcgtcagaccatgccggtgtgcatgggagcgggcattcacccgccatgcatgctgcctgctgtctgccgcgatctatcgcgtcacgccagatgcgaacgcatgaaccactggaacttctcaagctcctgcacgtggtcctggatgatgttggagctgatcacgtccagctcgtccagctcgccgatggccttgcggtcatcggcgatgaacgcgtcgtaatactcgatcagggcctcaaggtacttcttggtgccggcgcgaccgtcgacgtcgaacggcttccaggtgcggttgcgggtgatggcatcggcgcggccgtcaggcgtgccgcccagcgtggcgatgcgttcggcggtctcatcggcctgcgcgagcactgcctcgacctcagggtcgagcatctcgtgcacggcgatgaagttgggcccggtcacgttccagtgagcgtgcttcaggaccagcgcggcctcctgctcctggctcagtcggttctgcagaatggcaatggccttctcggaggcggcttcgtccagtcccggcacaacgaatgcaagtgtcatattcgttcctttcttctgggatatcagtcaccctccagtttatcgatgaagcctgcgcgatgtgtcagccgccagcatagttatcgctcacagtgagcgacgtaacagaaacgtaggctgatgttcatcagcggtacaggtcgggtggaatcagtgtgccacaccaggctgatttcgggccgtttttacgctggtgtggcacggactgggctgagagatgggacatgcggcggtgcgactgggcaaggcatgtgcagcggggtaacacgaaacacggcagacggcgtgactggacgtagctgcacattcagcaggtacaatacggcaggtcaattcgcgtcagtcaatgcggtcagtcgtcactcgccgtcatccgcgtcggtgccggcggacacactggagtaaacagccgggaccccgcggcgaaaaggagcgtgcagatatggtcgattcgcgtcgcgatgtggctggccaggccggccggagccccagcccatccgtgcaggctaccatgattggtctgatggcgattctgctgtggagtctgatgaccgggctggttcgcgtggtcgccgatgcgttcggcgcgacgctgggatcggcgttgatatacacctgtggcgcggtgctgctgctggtttttcgccggccggcaccgttgcgcaagtatccgcgaacgtatctgatcgtcggcggcctgctgttcgtgttctatgagtcgtcgatttccttgtcgatcgggctggcgtcttcggcggcctcgtcggtggaggtcagtctggtgaactacctgtggcctacaatgatggtgttgctggcggcggcattcgtaccgagcggcgagaagcgttcggcgcggaacgaggggataggacgggaacccgcagcgcccagcgacgcgcaggctcaagatgactcggtccagtgcggcacaaactgcagcgcaggcaagccgccccgccattctcgtggccgcgcggtgctccgcgtattgcctggcgctgtcgtcgccaccgccggcgtgatactggcggtcggcggcaacagcggcttggactgggcgctcgccgcagggcatgtcgcggcgaatccactgccgtatctgctggcatttgcgggcgcgctcgcatggtcggtgtatgcggtgttcacgcccgcgctgtccaagggattcgacggtacgtccgtattcttcccctttgtggccgtggcgctgtggatcatccacttcgcttccggccaaggttggccgtctgccgcgccgtcggtttggggctacttggctgtagtggcggccgcggcggtcatcgctggcggatacgcctgctggggctatggaatcttgcacggcagcatgagcacgcttgcgatggcctcttacgccacgcccgtgctgtccacggcagccagcgcggtattgctggggttgtctttgacgttgccgttctggtgcggcgctctgctggtcgcagccggttcgatcatcaactggtggatttcctcgcagcgccgatgatcggcaatggccggcgacctcccgcccgcgctgcgctattcggcggaaatcggcgcgtggtcaggggcgccggccttgcgcacctcgatggtttcgatacggcggccgtcgaccttggtgacggtcatgtcgtacccgtcgtcggagtgcagcacatcgccctcggcacccatcttgccggtgtgtgcgaggaaatagccggcgacggtctcgtacgggccgtcctccagttcgatgccggtcagatcggcgaagtcctcgatggtcatgctcgcgtcgatggtggcgacgccgctcacgaatgcgggctgctccttgcgctcgccgcccggttcgctgggcaggtcgtattcgtcgcggatgtcgccgacgagctcttcggtcatgtcctccagcgtcacgatgccgtcggtgccgccgtactcgtcgatgaccacggccaagtggatgccgcgcttgcgcagcagttcgaggctcggcagcagcttggacgtgccgggtagcgaaatgccttctcgcgtcacgtcggccacggtcgttgcgttggggtcgcgcacgtccagcaggtcgcgcacatgcacgaagccgatcacgtcatcgaaatccctgccggtcaccggatagcgggagtacggcatctcgcgcacgtacgccgccgcgtccttgatgctctgcgaaccgtcgaggaacacgacatcggcgcgcggacgcatgacctcggcgacgatggtctcggacgcgtcgaacacgtcgtcgaggatcgtgcgctcgtctttgctcagcgacgtgttcgtgttgacgagcacgcgcagctcctcgtcggagacctcgctttcggtctcgttcgggtcgaagccgagcaggcgcacgataccgttcgtgttcttgccgatgagccagatgatcggcttgcagaccttggcgaacacgtcgatcgcgggcactacggcgcgggcgatctgttcggtgcgctgcatggcgatgcgcttcggcaccatttcggagatgactatcgagcagtacgagatgatcagcgtcagaacgatggtggtcagcggtgcggcgatgttcgccggcacgccccagcttttcacgacgggcacgatgaacggcgaaatcgacgattcgccgaacgatgcggacaggaagccggagagcgtcacgccgatctgcacggtggacaggaacttgttggggtcgcgtgcgattgccgccacacgtgcgccacgggcgtcctcctgttccatttgatcgatctgggatccgcgcagggagaccaaggccaattcggtgccggagaagatggatccgagcactaggaatatgaagatcagaaggatgtttaaaccaagtgacatggactctactgtaggggggtggcacgtcaattgtcgcagcgaatcattctcagtaagaaaggtgcgagcctgccaacgcccgaaacgaacatcaaaatcgacaaagtcccgagatgccgccctttatggttttgtgcgcttgtgcgcaaatgtgagaaatcctcgcacctttcttattgagaaccgttcgctgcgacttgccggccggtcacttgcatccgcaggactgcctggtgacgagttcggcggcgatgagctgcacgtcgggcgtgtgcgcggggtcgagcgccgcgttgaccgcgcagcgggcgagctcggcatcggtctgcgcggaggagacgaacatcgcgtcgacgttgcgctcggcgagttcgttgatgcggcggcgctcgccttgcgggtcgcctcgcgacgggttgatgatcagcgcccgttcgcgtttggatgcagcggcttcgagctggtcggtgaattcggcgaagtatgggttcgagaagtcgggcacgatgacgccgagcgtgtgcgtggtgccggtcttgagggctcgggcgacggagttggggtggtagtcgagccgctgcgccgcgtcgaacacccgctgcgcggtgtccggtgagattatcttgggactgccgttgagcacgtagctgacgacggcggtggagacgcctgcgggacgcgccacgtcgaaacgggtggcgcgttgccgttgcggatgcggcgtctcgaatgcgtcacgctgtgcggggtgcgtcactgtgtgcgcccttgcagcgtgacgcatattgtataaccattggaaaataagggttttactgatgcgtcactgtgtgcggggccgcacagcgtgacgctacccgcacacagtgacgcgaaatgcggcgataagtcacgctcccgtcagaagctcagtacctcgaccttgccggtggacagctggtagcgggcgcctacgatcatcagtcgatcatgcgccagcgcgtcctgaatgatttcgctgcgcgtgaccagctcttcgatggtacgcgccacatgtacgcgttcgaagtcctcgctcgtatccaactcggcctcccgcgcctgccataccgacatgccgaccgagcgcagcacaatcgaatccgagctggcgatgcgctcatccaattcggccatcgcatcagcggactccaacgagctctccgggtcgctcgtgctgtcggcgatcagcgcgtcaagttgttcggcgcccagcgccaccgccccgcagccttcatgacccatgaccatgagcaggctgacgtgcagatgatccacggcatattccagcgatgccaataccgcgtcgtcgatgatctgcccggccgtgcggatcgtgaacaggtcaccgagccccgcgtcgaagatgatttccggcggaacgcgcgaatcggagcatgacaataccgccgcgtcggggttctgccggtcgatcagtgattcgcgggtctgcatgtcctgccacgggtgctcgctgtgcccttcggcgaaccgccggtttcccgccagcatgcggctaagcgtcgagttcgcggtggattcctgatccgggtcttcctctgccatgacatctccgttccgagtctcaggttcgcgtcgggtcggcgtgtatgtgcctgtatgtgcgagcatagcggaaacctgtttgataagtatgaaatatccaaggaacgttcatcacctctgctcatagcgaaaccgcggatcgggcgcggctgtttttaccggtttgtgagcgcaaactgtgatgattgtcatgaagaaaccctcgtgcgtccgtatcggcgaaagccgcttgacgttacgatggggagacgcaatgaccggattgcgtggaaaggaacgatgatgacactgcttcagcatgaactcaccgattttacggtgcaggcttttcagaacaacgaattccatgaggtgaccaaggcggacgtgctcggtcactggtcggtgttcttcttctacccggcggacttcacgttcgtgtgcccgaccgagctggaggatctcgctgccaagtacgaggacttcaagaagatcggctgcgagatctactcggtctcctgcgacacccacttcgtgcacaaggcttggcacgacgccaacgaaaagatcgcgaagatccagtacccgatgcttgccgaccccaccgcactgctcgcgaaggacctcgacacctacaacgaggccgacggcgtggccgagcgcggtgacttcatcgtgaacccggagggcaaggtcgtggcctacgaggtcatctcctccaacgtcggccgtaacgccgacgagctgctgcgccgcgtgcaggcctcgcagttcgtctacgagcacggcgaccaggtgtgcccagccaagtggacccccggcgaggagaccatcgagccgagcctcgacctcgtcggtctcctctgatttcccgcctcactgacgggctgagttgtcaagcaaacagcagagctgtttgtaggcgaaggcgagccgacaggcaagcacaacaggctgcggctggaggccgtccctgattgcaggggctggagggctgtcggtagcggtcagagttggctggggatcgccaactctctcgcccccgctggcgggtagcgatgtaaggcgagtggcctctccgcccccgctggcgggggggggctggcggcgacagccgactgggggtggtcgcggtgataggcgaactaccccacccgcttcgcgggagccccgccggcaggggcatatgcatatgtaaggagttccatatcatgacccagatcaaccgaagcgatctgtatgacgttgttgtcatcggtggcggccctgcgggactcaccgccggcctgtatctcgctcgcgcccgctatcgcgtgctgattctcgaaaaggatgatttcggcgggcagatcaccatcaccgacgaagtcgtcaactacccgggcgtcggccatacgtccggtcgtgcgctcacgcagaccatgcgcaaccaggccaaggatttcggcgcggaattcctctcagccgaggctaccggccttgacgtgaacggtgacatcaagaccgtgcacacgtcgcgcggtgacctgaaaacgttcggcatcctgattgccaccggagccagcccacgcaagcttggtttcgccggcgagggcgagtacgctggccgcggcgtggcctactgcgccacatgcgacggcgaattcttcaccggcagggaggtgctggtcgtcggcggcggtttcgccgcggcagaggaatccgtgttcctgaccaaatacgcctccaaagtcacggtgctcgtccgcgaaccggacttcacctgcgacgcggcggtggctgccgaagccaagaacaacccgaaaatcgacgtgcgctacaacgtcgagctcaaaggcgtcaccgccggccagggcgggctgcgcgaggcgacgatcctcgaccgccgaactggtgagacggaatcgtggaagccatccgacgacggcacgtttggtgtcttcgtgttcgccggatacgtgccggccaccgagctcgtgcgcggtgtcgtcgaactggacgaccacggctacgtggtcacgcgcggatacctcgagacctcggtgccgggcgtgtacgcggccggtgacctgcgcgtcaagaacctgcgtcaggtcgtcaccgccaccgccgacggtgccatcgccgcagtggaactggagcggtacgccaagcagatgagcgagaaaaccggtcttgtgccgcctcgcccgaccgcatccgcatatgagcaggccgaagcgcagaccgcggctgccgccaacagtgctgccgctgccggcaccacgcccgccccggctcctgccaagcgcagcgccgataccgccgccgcgtcggccgccgccaaaaagcccggcgagctcttctccgccgccatcaagcagcagctcggcgtggtctttggccgtatgacccgcccggtcacgctcgtcctcgaactggacgatacgccattgtcgacggagttgcagggattcatcggcgagatggtggcgctgtcgaacggcaaactgaattcggtcgcggtcgatgcggcgggcgtgatcaccgctgaggacggttccagcgcgccaacgtcgttgacggtcggcgagccgttggccgtcaccttgccggatggcgccgaactgccggtatatggttcgctggatgattccggtcgcgcgcagttcgacgtagcaggggtgctgccgtctgcgcggccggtcgtgcgcatgtgcgtaccggccgagaattccgacgccggtacgttgctgttcaccggcttggccttccacggtgtaccgtccggtcacgagttcaattcgttcgtgctcggcctgtacaacgccgcgggttcgggccagcctctggacgatgacctcaaggctcgcgccgaggccattgacacgccgatcgacgtgatgatcctcgtctcgctcacctgcacgatgtgtccggaaaccgtactggccgcgcagcgcatcgcgtcgctgaacccgaacgtgcgtgccgaagcctacgacgtcgcgcacttccccgagctcaaggaccagtatggcgcgatgagcgtcccctgcatcgtcatcaaccagcccggcggcaagcagaaggtcgaattcggcaagaagagtgtcccgcagatgttgacattgctcggcgcatagcgggcgctgtgaccagcgctgtcctttcatcccctttcaataattcttacatgttagaattctccgttaacatgttagaattattgaaagccgtgaaaggaagagccgatgctgccgaccaaggaaagcctgacggtggagttcaaaagcgaacgccaacgcccgcaaaccgatgacgaaatcgtcgacaatgtggtggcgatggccaataccgaaggcggtacgctgtaccttggtgtcgaagacgatggcatggtgactggggtctgtgaccggcatcgcaatgtcaatggtctggcggcattcattttcaacaaaacggttcctcagctttccgtgcgggtgacgttgctgagcgagagcggcaaaccggtcgtcggcattgaggttgacagcagtcagcagatcgtgtccaccagtcaggggaagacgctgcagcgccggctgaaagccgatggcgcgccagaagtcgttccgatgttccctgcgcaattcatcagtcgtttgtcgcagcagcgtagttacgactacagcgcgcagcctgctccggggtcgacgctgtccgatcttgatccgtctgcgcgcgaccgtctcagggagagcatacgcacggccaatgccggcagctcattgttggcatttgatgatgaggacttcgatcgggccctagaactggtagtcgacggccctggcggcccgcagccttccgtggccggtctgctggtcatcggtacggagcgggcgctgaagcgttccgtaccgtcggcctccgccgtattccaggtcatgaaaggcacgtctcccaaggtaaacacggatccgttcttcatgccgctggtcgatatgctccctcgtatcggcgcactgatggaaccatggaatccagatcatgaggtcatgagcggtctggtccatgtcaatctgccggacttcgatcatcaggcgttccgcgaggcggcagtcaacgcgttctgccatagggattatgcgaggatgggatcggtgcggttcctcgtggacgacgatggcctgaccatatccaacccgggaggtttcatcgagggattgagcgaaaacaacctgttgaccgcgcagccgcgttcccgcaaccctcagctcgcctccatcctcaagacggcgggatatgcggaacgcaccggtcgtggtgtcgataagatatatgccggctccttggcttccggtggggcatttcccgattattcgcagtccacggcgtcggaggtggtgctgttcctgcgtcgcgtggtgccggatgaggcattcgttgtgatgattgccaatgaagaggctcgccgtggcgctccgttgtcggtgtggtctctaatcgtgctgtcgttgctgcgggagcatcgcagactcagcgtggcgcaaatgcgcgaattctcgcgagtggagtctcggcgattggtcggcgcggtcgaaagcctagtggagagcgggctggtggaagcctgcggcagcggtgtcgcacgagattatatgctgagcgcgcgtgtatataagagggatgataagttgccggcttatgcgaggcaaaagggcctcgacggtcggcgggagaacctggtgacggaattcgcgctgaacaatgggggcgcggcgaccacgtctgacgtgatgaagctgctggatttgtcttatatcagcgcgtacaggctcatgaagagacttgagggggagggcgtattccggcatgaggggagtggtccctcatcccgctacgcgttggtgtaaggtgactggcgctgtcctttcatcccctttcaataattcttacatgttagaataccccgttaacatgttagaacttcgttgaccgtggccggcggacatggtgctttcgacgcgccacacggcatcaataagggggcccgctaggcgcaggcccccgaatcagtcaactatgagagtctattgtcgcggatgtgggcagttacctcgttcttggacgaatactgtccggggcgattcaggaaagtgatttactttcagtatctgaagccctccgccttgcgttacggttcaggccccgatggatctcttgccctcgccgttcctgccaccgagatacttgaccaggctgatgctgatcagagccagggcgaacaggccggtgagcaccggaatcagcgcggcgtagcgatgggcctgatcgggcgtgtgcgtgaccacgaacgaggccagctggttgccggacaggccggcgaacgcccaggcgctcagcgcgagaccgtgcgtggtggagacggtcttggtgccgaagtgctggtcgagcagcaccggcagcgttgagaaaccgccgccgtagccagcgttgatgaggaacagcatggccagcacggcccacaacagcgcattgttgatgctgttggtgaagatctgcagcaggcataccgcgatcgacatgatgaagatcacctgataaacggtctcgcggcgcttcaggtggtcggagagcgtggagaagcccacgcggccggccgtgttgaacacggagtccacggcgagcaccaggccgatgatgccggcgatggcggcggcgaacttggcggggctcaggccggcatactgcgggaaggccttgagcacatcgtgcaggatgtccttctcctggctgataagcgccaggccgcaggtgatattgatgtagaaggcgatccagatgccccaaaacacgggcttcctgagaatctccgcgcggcttacatgcgaggtcacgggatcgtagacccagtcggccggacgcttgatgagcaggaaaccgaagaacatcatcaccgcataaatcacggcgaggatgaagaacatgttgaccagccccaccgtgccgatcaggtactccatcaacgggctggcgatggccttggccaggccgaagccggcgacggcgatgccggtggcgaggcccttgttatcggagaaccagagcatcaggttcttgaccggggtcaggtagccgacgcccaggccgatgcccatgatcgcgccgtagcagatgaacacacccggcaggaagttcagagcgatgctcacgcccgtgccggcgaagccgaccacgaagcagaccatggagacgagtgcggatttcttgatgttcttctccaccatggggccggcgaatgcggctgacatgccgaggaagaagatggcgagcgagaagccccattccacggaggccgggctggcgttgagcctgtcggcgatgagctgcttgaacacgctccagcagtagacggtaccgattgggatatgaatcagcaatgcggggatgattgcgctggtccaacgattctcggtaaaccttgccattcggtaggatcctttcgtaactggctgtacgatgacctgccggcctgaacaagaaccgcatcgctcactcaaggcacatcatgcaggactgttcgtgaacatgtgaacaattcactgaacatcattggtgtgcattctatcagcgttccagctcttgtcgacgccgacagcgctactataacgccacttcgctggtgggattgccgatgattgcggtcttgatccgtgaacttattcacatcggaaatgattatgaaatcgtatcaatgtgattgatagggggggaacgcgaaagccccacccgtgtagggcagggctttcgcgatatgtgctgatataaaacggagcctccgctcgtcgcggaggcgctgtgctgcggtgaactttgcgcacgcaaagcccaccgctacgttttggccttggaaagcccaccgggctttccaagcggtgttggccgcgcatgcggcccaacaccggccaaaacgtcagcccgtgttctgcaggccggcggcgacaccggagacggtgcacaggatcagatagatgaatcccgcctgctggctcttgctgagctcttccttgtccaccttcttgcgcagcgaacgcaacgcaagcacctgagtgacggacagcgcgtccacgtaaggggagcggatgcggatggcctgaccgagcacgtgacggtgctgcagcggccattcgtcgttgacgatcttgagcacccacttggtggtgagcttcatctcgtcgagcaccttcttcgacaggttctcgtcatcgccgagcgccaagtacatcttggcgatgcgctcatcggtcttggccagcgacatctcgatgttgtcgatgaacgtggagaacagtggccactcctcgtacgcctcgcgcagcgtgtcaaggtcgccgaacttctcgcaggccgaaccaaggccataccatgcggcgaggttgatgcgcgcctgagcccaagagaacacccacggaatcgtgcgcaggtcgtcgagcgacttcgcgcccaaaccacgcttggccgggcgggagccgattggcagcaggccgacctcggtaagcggcgtgacgatcgagaaccacggggcgaagtccggcgtgttcagcaggtcgaggaagcgctcgtgcgaggcgttgtccagaacctcggtcatctgggcgtacttctcggtcatctccgtgttcgtcttctcgacgctcggagcggactgcagcagcgtcgcggcggcgacggattccagatggcggatggccagcaccgggttgccgtagcgggcgaaaatgacctcgccctgctcggtgagtttgaagcggcagttgacggagcccttcggctgggcgagcaccgcgcggttggcggggccaccgcctcgaccgacggctccaccacggccgtggaacagcgtcaggtcgatgtcatgcttcgcggcccaagcgacgatgcgcgattcggcggaatgcagcgccagcgtagcggtggtcgggccggcgtccttggacgaatccgagtagccgagcatgacctccatcttgttgccggtggccttcagacgagcctgcacctcggggatcttgacgatctcttccagcacgttcacgcagttctgcaagtcctcaagctgctcgaacagcgggatgacgtcgatgaccggcacatcctccgggtgcgaaaacgccagacggttcagctcgtacacgtcgcgcacgttctgggcgctcttcgtgaacgagatgatgtagcggcgggcggccttgatgccgttgcgcttctggatggcaccgagggcgcggaaggtgtcgagcacctcgtgcgtcatcggttgcagttcgccacgctcgccgtgcaggccgtgctcgcggatgtcctccagcgcgcgggcgtgcaccacggagtgctgacggaactccatctcgaccatgtggaagccgaaggtctgcgcctgccagatcagatcctgcagcgggccatacgccgaacgcttggcgccggcttcggccagggaacgctgcacgacctgcaggtcggcgatgaaatcgtcgcagctgtggtacatgaggtcggcgtcgcgctcgatggtgtagcgcaggcgatcggccatcaccagcatgacggcgcggtgcagctctttggtggagatcagtgcggccttgtcggtcaggcgctcgctcatctccttctggtggctccacaggctcttcagctcggcgctggccggggtcgtctcggactccatggtcaggttgcggccgaccgtgcgggtggcctcctcaagggcgccgatcacatggtcgctgaacttgcgggcgacctgacggctgaccttggcggtgacgttcgggttgccgtcgcggtcggagccgatccagcttcccggatggaagaacgccgggcactgcggctgttcgagaccggccttgtcgcccagcagccagtcgttgaaacggtggtagaccttgggaatcgtggtgaacagcgtgttgtcgaagatgtcgaggatggtatcggcctcctcgaccggcgtcggcttcttcagcgcgatcggggacgtgcggaacagcgcgtcgatctcgttgtagaggcggcggacgttctccttcttgtcggagccgccgaggcgcttgttctcttccagcagctccgcgatgcggcggatcttgccttcgactgccttgcggcgcgcttcggtcggatgcgccgtgaacaccgggtggaattcgagcttctccagcaacgccttggctctggccggccccatttcggtcagcagctgatggtaggcggtggtcagttcgttcaccgggtcaacggcttcgtcgtcttccacctggttctcgcgctggtgcagcacggaaacgcggtagttctcctcactcaggttggcgaggtggaaatatgtggcgaatgcgcgggcgagcagctgggcgtcgtgcagattcatcgcatcgatggtggcgacggcctttgccagaccatcctcatcggggtgcggatccgccgtcgctccggcgaaatgctcggcgcttgccttcaccgcgtagttgcgcacggtgtcgaacgtcgccagcagctgcgggtcatattcgcccagtacgtcgcgcagaatgcgcaggcacaggctcatgtcgttgctgagcgactcaggcagctcccgctcttcggggcccttggtcccggtgccggtcgacacgatggtcgcgtcggcgggcgtgatctgttgatcggtatcggtcattcataacctcctttgtcttttgggtccggttgctcggtcagtcggtcctccgcggctcctccgcggttgtgttggccgtcagttgcgagcccacagccggttgcgccaaaagctgtgtgcccattctattgccctgaaatcgcaagttgtattacgaagtccaatttttctctgaaggattactggtaaatatgtaatcttcaccatatcttcacgctgtcggatggcccgagaatgtcgtcctgaatatcctcgtcgacgtatcgtccataatcttgtcgaaggtagtccatcatgcgaacgccggtttcggtcataccccatgagttcacggcgcggagtaagaatgactactgtaaccatcttgaaaacacgcccgagcacacccatagggcggcaaaaacaacggcatgatacggatagagaagaacatgcagcagcacatgaacggcgacgcgccccatcaggacgcggcgacggcggtgagtcatttccacacccactccgttccccttgacatggaagacattcgacgcgactgggacaagccgatctccgaggccggcctcgccgccaagaccagcgtcgtcgtgcgcgtcggcgcactggacctgggtgctggaaccggaagcttccgcgtgcgcgagatgatgcaccgcatcgcgtaccccctgggcgtgcacgtgcgcgccgacgtgaacctgacggacatcgaggccacctgcaccgatgacgccaaccgcatcaccgaggtcatcgacctgcccaccaccggcgtcaacaccgagcgcatctggctgctggagcattacaccgactggttcagcgtgaacctcgggctcgattccatgtaccatcgcgcgggcgacgtgtccgaaggtgtggtgcagaaccttgagcaaagcgacatgtccgaggtctccgcgcagctggccaagaaactgcgcgccgagaagaaggcacagaaggagctcagcggcgaggcctccgacgacccggtgctcgacgccctggaggcggccgaggtcaccgtgcccgtctccatggtccgcgcggccgcggccgacatcgccgcggaaggttcgacggacgacgagctgcgctccgaatccgaggccgtcctggaagaggatcgcgaggccaagctgctgcatgaccggttgatgcagcagcgctccggaaagcatgatttcgtggagacgccggatctcgacgcggccgccgcggcggcgggtggcacaggcgcggacgcaggcgcaagcgccagcagtgcggaagaccagaatctgaacgaattcgggacatcgatgtcggcggaggcgctgctgggcgcgaaacgccggaaaacccgcgcccacaagccgctgaccggcgagtacgccgagcatttcgaccacgtgggccgttgcgcgggcgaagggcgcaagcccatcactgtgcggcaggcgcatgagcggctcgacctgatcgagagccgtaagccgctctattccccggcgttcgccggcttcgcctccgcagtcgcctgcgcatccttcgtgttcctgctcggcggcggcccctacgacatgatcggcgcgttcgtcggcgccggactgggccactggctgcgccgcaaactgttcgcccgccatctcaaccagttcttcgtgacgttcgtgtgcgtggccctggctgcgctcgcctgcacgggcactctgcgcctgatcggcctgctcgacccgatcgcgctgacgcatgacaccgcgtacatcggcgcgatgctgttcgtcatccctggcttcccgctgataacgggcggcctcgatatggcgaagatcgacttcccgtccggcatccaacgagtggcatacgtgctgtgcatcatcctgatggccacgctggcaggctggggagtggccatgatcgtgcatctgaacccgaccgggttcgagccgctggggctcaatccgtgggtgaacacggggctgcgggccgtcactgccttcctcggcgtgtggggcttctcgatcatgttcaattcgccgcagcgcatgtgcctggtcgccgccaccatcggcatgatcaccgacacgctgcgactgacgctggtcgatttcggggtgccggccgaggccggggcgttcatcggcgcgctgctggccggtctgctcgctgccggatggcgcaccgccgtgcacaacggcctgctgccgccgcatctgggctatccgcgcatatgcctgactgtgccgtccatcgtcatcatggtgcccggtctgtatatgtaccgggcgatgttctacctcggacagttcgatacgctgcacgcgctggactgggcgttccgagcgttcatggtgattatctgcctgccgataggtttggcgatggcccgcgtgatcaccgataagtcatggcggtatgacgtctgacgccttgcctgcgcggcggacggttcccgatgggattcgtgtgaggaatcctcatgcgttccttgccgggaatcattcgccgtgcaaagaggagtacgtccaacggcctgcgagcatggtcgccgccaccggcatcgcccgcatctcctccggcgtggagacagcatacgggtcgcggtccaagagcaccaggtcggctggatctccgggctcagggcggtcgcggccgacggctgtggaagccgccagcgcggtgcgcgcatccaggcattgctccggctggaacggttcgcggtctgagctttccgtgccgaacacagcggccgatatcgccatccacgggtcgagcggcgcaaccggcgcatccgaccccatgcgcagcctgacgccggcatcgtgcagtgccttgaatgcgtaaggggttccacccggattcgcccagaaccgcgtgatgacatcgcgatcgtccatggcgtgctgtggctggatgctggcggtcagcccgagcttcgcgaatcggggaatatccgccggcttcagcatctgggcgtgctcgatggaaccgtgggcgtgtgtgcttgccgccgcgttgggcacgatggtgttcgcctcatcgccgatggcatggcacgcgatggcgaacccatggcatgtcgccacgtggaaatacgtctcgatctggtcgggtgcgtaactgagcgtgccgtaaaagtcggggaatatatcggaatacggcatcgagcagaacgccgaacgggtgttcagcgagccgtccgagatcatcttcatcgcgccgacatggctcagtccatcgctgccgggcagctcgacgcccgtcttccaaccggcttcaatcgcatcctccagccgttcgggatacacgcccgcctccacgcgcaatcctcggatgccgtgggtgaatgagccatcccaatcgatgcctgtccaagcggaatcgttagcgtcgcgcgggcggggagacgccgcggagaaccggcgggttcacgtgtcgacgttttccgccatctcatagtcgcggatgccgaccacgcctttgcgggcggcatccgcctcggccttgcgaatcagttcgagcgtctcctccgccgctccgggcgcattgtcgagcttgcagtaggcgtcgaaccattcgagctcgcccacaagaccggactccctcacggtcaggcccagtcgccgcgccgccggttgccgtcgccgagatacgggagccggcaggcgtgattgccgcaatcgcgccgcccttgatcgcgatgtctacgcggcgggcgctgcccgggaaccgcgcgttggtgattatcgtcataatcgcctgtacctgccatcctgcatcagatcagaaggtcatgggcgcatgtggcagaaacatcgtacatatccgtccgcgtctcggttgcttggccagttacaccaatccccttcaccgtacccccctaattgtgtggcgtcaccttcggcgtcacgttcaaatcgtctttccagtgtacatgcaagtcttctgtgaacagaacccgccggtgtgtacagtcgtgcgaaagaaggcggccggcgatttcctcatgcgcggtctccgccgagccgaggtgagttatccaccgcgttgcgcacatttatccacatttgtccacattttttgaggcgcggtagacggggaactgcccggttccctacactcggctccacggcaatattcgagtcacaaaggagcggccgaccatgggcggatcaatcgcactggtgcaattgacggagttgaagcaccagcgtatgaagcagtgcgctgaattccagcagcgcagcaggtggcagccgccatacgccttgaccacggccctggagcttcaggcgattgaaataccgcgcctgccaaaaggacgcgccatgttgaacggtattacagttgtcgtcccgagtgccaatgaaaggcgcaatctcgtcggcataaacgaagtgacatggtccttccctgttgatgtcgtcatggtcgagcaatgcttgtgcgtgtctccggcctgcacatgggcgatgttcgccggatggctgaatcttgaagagctgatcgtactggcggagtcaatgatgcgccgggatgggcgtctgcgcaggacgaccattgaggagctgacggcatatctggattcggcgcgggaattcacggaagcggtctttgaagagacgggccgccggccgaatatgtttcgcggatatgccaattgccggcgtgcgttgcgtgtgattcaggaggggacggattcgtcgatggaaacgcgcacccgactcgttcccctcaaatacgggatagacgcgccctgcgtcaattacaagattggagtgaagcgtctgaaccgggccgtatatcttgacctcgcttacccggaatacaagatctgcattgagttcgacggagggcatcacgccggtcaatggctggaagatgcacgccggcggcaggcaatcgaagacgagaagtggcggtatatccaagtcaccaagcttgacctcggtgatgaatggagtgaggaagctttagccagacggatcgcggataagatccaggaggtcactggaattcccgtgcccgtcactgcgcggaagaccatccaacaggtgtgcgatgccagagcgatgagacgcaagccactgtacgagcggatagggtttgaaccattgctgccgcgagtcccgaacgccaatgccgattttcctgacgcggatgaccttgacggtatcgcgtgatcgaaggcaggggtgcggaatcgcacgattgcgctgatgcgattgcgttggagagagaagcggagggctgtagctggctgcgccttgaccggatggcgtcttctgtgacgctatctgtgtctcaaggggttgattgggcgtcctctgggcatctatctgcgtttcagggggttgccgaaacgcgatacccggagtattgccggtgaaatgccattggggtcatgcggtttgaggtgcgtttatactttggcaccaacccctcgaaacgcagatagccttatctcggcgagttcgacgggtcggggcaggggcgtgcagacggctttctgtcccgaagggcgacaccgttatgggaaggccccttcgtcgcgtgcctcggggcggagtgacgaagggggcctgatgcaatcgttgcgttcgactgccggaaaatcagtacttcatgcccatggcctcgcgcacctggtcaagggtctcctcggcgatggcgttggcgcgggcgttgccatcgtgcaggatgtcgcggatggagtccatgtccttggcgagctctgcgcggcgctcgcgatgcggggcgaggaactcgttcacggactcaatcacgtacgccttgagcgcgccggcgcccgcatcgccgatttcggcggcaatgtccttcgggtcgcggccggtcaccagtccggcggtggtcagcagcgcggacacctgcgggcgggcgatggggtcgaaggtgatcttgcgctcggaatcggtcgggctcttcttgatgagcttggcggtctccgcggcggtggcgcccagcatgatggagttgccgtacgacttgctcatcttgcgaccgtcgaggcccggtatctccggtgcgtcggaaaggatcgcggcgggctcggggaacaccgggttcttcttggcgtagcgctcgttgaagcggcgggcgatggtgcgggtgatctccacgtgcggcaggttgtccttgccgatcggcacgacattggccttgcagaagaggatgtcgcacgcctgatgcacggggtaggtgagcagcaagccggtcagcgcgtggccggaggcctccatctcggacttcacggtggggttgcggtgcagctcggcctcggtgacgagggagaggaacggcagcagcagctggttctcggccggcacggcggagtgggtgaacatcatggtcttggtcgggtcgatgccggcggccatgtagtcgagcacgaggttcagcacgttgtcctggatgtgctcagtggtgtcgcggtcggtgatgacctggtagtcggcgatgatgatgttggtgttcacgccgcggttctgcatggccacgcgctccttgatggagccgaagtagtggccgaggtgcaggcggccggtcgggcggtcaccggtgagcatcgtgaacttgcccggctcggcctcaagtttggcgagcgtggcgtccgaacgcttcttcgcggccaggaagctggcgctcatttcgttgcccgctgcggtcagttgctgctgttcttggtccgtcataagtcgccctttgcttgcttcaaaacgccgaaaatatcgcttttatcgtaaaagtccaagcagacaaccatttctctcataacaagtggtactctcttatgtgatgaattgatagttacatttacatgccagggggtcacatgggccgcggacgtcagaaagcaaaacagcagaaaatagcccggaagctcaagtacctgaccaccgataccgattacgatgagctcgccaaggagctgagcacgcaggagccgggcgaggggtcgcccgatccgtttgccgatatcgaggcttcgtattctcatgatgcgaacgccgccgtggacaatacgcagggatccgtcgctgaggatgaccttgacgagtacgccaagtgggctgccgaggctgcggcgaaggcgaccagtggcgaaatgccggccgtgaaggcacctgaatctcaggctccgaagcccaagccgatgccgcgcaagccgattcccatgcccatgccggccgcgctcaagcccaagaaggcatgattttcggatttcgtcgctgctggcccggtggtagggccgcattgacgcgatttcgtatgtcatgatgacgattctgttgcgatatgcgatgacagcgatgccgacgcccagtacgtgcactggctgaccgcatcatgggcggccgctcggcagctggagccagatagacgtattcccgtcggcagggcggtttctgacgcgctatgggcggcggcgtgacgtcgatattctgctgctggacgtcgaaatgagctcgatggacggcgtggcgttggcgaaggccgtgcgcaaggcgggcggcacgatgcagatcgtgttcgtcactgggtattcggattacatcgccgaaggatacgacgttgaagcgctcaattatctgatgaaaccggtggatgcggccaagctgttcgacgtgctcgacaaggcggtcgcgcgcatgcgccgcgattccaggtgccttgatctgcaatgcgcggaagggctgatgcgtattctgctggccgacatccgctatcttgacgtgcgccgtaattatgtgacggtgcacgccgaccgggattatacggtgaaacgcccgctgggcgagttcgaggccgagctcggcgacagattctgccgggtgggacgcgcgatgatcgtgaacctgcggcgaatccgctgcgtgggcaggtcgtccgtgcaatcgaccgacgggacgacgccgccactgcctcgtggggcgtacgagccgttgaatcgggcaatcatagaccagacatgattacgcatggccggctcacggccggcagggtgccggaaagccgtccccggctggacggggcagaacgcaaaggaggggcacgatgtggttctgtgggcgaggtaaggccgacagggccatcgcggcatatcagcgcgagctggtcgacacgcattaccgcgaggtcgagaacatgtaccgtcagatgcgcatgtggcggcatgactaccgtaatcaccttcagacgatgaaggcgttggataccccgatcaagtccggcaatgcgatggccgacgtgattctgagcagcaagatgtcgcttgcacaggcgcatggcatcgacgtacgcgtggacgcccatacccatattccgatcaagctgcgcatttcggaactcgatttgtgctgcgtcctcggcaacctgttcgacaacgcgatcgaggccaacgacgggttgcctgaagccgattgcatgattcgcgtgtatatggacatgaagggcacgcagctgtacatctcgttcaccaacgcttcctcgggcggcaagcagcgcaaggtcggtggacgcttccgcaccaccaaatcagacgaggggcacggtttcgggttggtccacatcgaccagatcatcgaggctgcgggcggctacctgagtcgcaacttcgaggacggtgcctccaccacggagattctgctgccgcagtcctgatgacggcggtgcgggctcatgagagcggattgtcgatgcgcgtgctgcccgccggcgaggttggcgcggccatcgttgttctgcccgtatcgtggcagcgtggcagtttgccgcggagcgggtgatatggcctgtttttttccgctcttatagtggggcggcttgcgccgtttggtttgcgtaatactcggtttcggtccgttccggtgtccggtggcccgagggccggtgcggacgcttcgggtccccgccgcgagacccgccggaacgtcgccggttccgggtccctcggatcccggaagggctcgtgccgccggacgagcccggtcctgtacgcgccgtcggcgttctcggccatggcgttgccgtacgggtcgccgaccgtgccggtcgacggcagcatgccgtattccatcaccctggcgtgcagtacaccgtgccggtgtaccgcacgccatgatcgccgtggcgggcgagaccgtcggtcccgccatgcgacgcagcccacgcgatcgcctgctccaacgcctgcaggggcggctcctccgtgttcatggtggtggcgcacgcccggcccacgatccgcctggcgaacacgtcggtgacggatgcggtatacgcggagcgcccgtcggccatgcgcccgtaggtgatgccggccacgtgcagccggttcggcgcctcggcctcgaacttgcggtccaccaggtcgggcctgccgcccgtgcccttcgcgggcctggtggtgacgggcgtctttccacgcctgacgccctgcatgccgagcccgcgcatgatgtccatcacctggtcgcggcccgcttccccgggatcccgacccttgccgacgagcccatgccgcacctcgcggcatccgtacacggcggagaacccgccggcatggatgtccatgacgtcgcgggccagcgcctcgtggcgcgcccgcatgcggctgacgggccctggcctgaacatgcggtagccgcgcggcgtgaggaaaccgcagtccagcgcttcggacaggaccttgcgatcggcccggccttgaaacggttcccgtattcgtcgatgcacgtggccatcaacgccgtgtcgggtcgagcccggccgcgaagaaagccggagccgtcgtcgatatctctttcgcccggcgcaattccgtgttctccgcccgcagccgcttcagctccgccatcgcctcctgcgcggaccgcttcgtctccgcggcggccgtcgcgtccgaccggccgcgccggcgccgcagtgattccggcgccattcccggatccttggcgacctgttcgatcgccttcgtctccgacgaatacgacgacctggactccgtcagcagcctgacggccttcgcccggaactccggagtgtatcgagtgccctttgccatggttccatcatctcccatcgagttagaggaaaagcggaacaaaaaacaggccatatcagtcgcacctcagttgctcgattgtggtgtgtttctgcaagttggcgtccacagtacgagctggtgactttttcttgaactccctgattgggaggaacaagtatgcttgaaacatcgttgggcgttttactgcgcccgtgcctttaaagaggcgcattgttgaccagcgaccgatttatcagcgataatctttcccattttctttgcgaagcattgcaagcgtcttgtccttgcgtgcctttcgtccgtccttattccgaatggtgccggttggaagatcgtgcttcttttcatacgtgccgacagtgcagtcgcttcttgtcttacgaactttgccgaacataatccgtctcctttggctttaggctattctaattgttaagcttgcgcatcattatattacctattgctcgagcggtggatagctgcatatcgaaagagacttctagctcaagatatacggaatgattccaccattaggggctgatactactggtatccgcaccatgaaatattctgaaatatccttgtgtcttaacactgatgtcttagcagaaggagaatcgcatggctggctcatacggcgcggagacgacgcagggggagagatacaggctttccttcaccgttggtggacttctcgccccgcagggccgtgcgcttgccgaaatgtacctgaatcgtatgggcggtggcagcactgagcgttcttcccaagccaaggtctctgaaaagatctctgaaaaggccgacgaaaagagcaacaagaatgctggcgaagaagtcggcaagtccattgccgcgattcgccaacaggccgtcgaggaaaacgttcttgcgattcgcacggattccgcgaacaggcgcgttgtggcggaaactactaggcggctcagtgcgctcacggtcggggagcttgcatatttggcaggcccatattcctccatatccgaccgcgaggcacttatgtggatcgcgatgtgccgttattacgcaatcgtcggggaattcgccggcgaagtacttaaaaagcattatcttaccggcaatacgcatttggactttgaggattatgatcggttcattacggacaaagccacatggcatcctgagctggaaaacataagcgagggaacggcgaagaaacttcggtccaatctgttcaaggccatgagggaggcacatctgttcgataataattccgacacggtgctgtctttccttcccagtccctctttggcggatattcttagaaagagggcggattcgttcgggtatcttccgatgcgcgaatcgtcgttatgagcagaacggaggatagcatggctgattccatcgccggtattggatttgtggatgagcgtcgtgacattgatgctgatttcgctcatttatatgagatcatggagtcccgttcattccggaccaacagcgggctggcgggagaacagccgtattacatctatgactacccgcccatgcaggagcttgaagtcgccgagcatatcaagcagttggcgaatcgtctgcagacgatgacgccgaaagatgatggcgattacgctccgcaagtgcttacgttggatttgtacgacattgctttggagattcttgagaagcgtggcattttggatcgcatattcaaaagggaggaaaaacgccacaaaaaggtttcatcggatgttcacacggataacttcttgagattgctcgacaatatactgggtgccgatgcgaatcacctgcccgataccattcgtgatcattacgagcagaccaagagcgaaggcggggccgatatcgtgttcattacgggaatcggcaaggtttacccgtatattcgtgcgcatacactgctcaacgcgttgcaagggcgtatcgatgatcgcccgctggtactgttttatccgggtacgttcacaagaagcgctacttcaggatcggtcatgtcgctgttcaactgtttgccgggagacaattactatcgtgcgcaaaatctgcatgagatgagcgtgcagctggaagcatagcggtttaaaggaatgtcctgtcagctgcaacatgacacgaggcaggattggcaagtattcgttcaaagaagaagggaacacaaatgaacgggggaaacggcatcagtttcaaggagctgttcagcaaggacattgaccgcaacatcaatggtgtgatcaaggccaatgatgagaaaaatcttaacgatgaggtcaacgagtatgtgctgacggaggagatttgccgcaatctggccaaattccttgacgcatacaacgacccgtcgaaccacgaacagaatggcgcatggatttccggtttcttcggttccggtaaatcgcacctgttgaagatgctgtcgcatattctgggcgaggtcccggctgaactcgttgacaagggcaataagccgaccatgagtcgcgaacagattgttcatgccttcatgtgcaaggccgaatcgcaggatgaccagatgcttgcaggtcagcttgaaaaggctttgacgataccagccacgtcgattctattcaacatcgatcagaaggcggataaatccaatgcctccgacatgctgctgtacgcttttgttcgcgtattcgatgaggcgcgtggtttctacggcaagaatccatacgttgcgaaattcgaacgcgatttggcgagcaatggttatttcgaggatttcaaacaagagttcgaacaggtggcaggcaaaccatggagcgaaggccgtggtgaggccgtgctatgggatgatgagatctgcgaagcctatgccgcggtgacaggcaaaccggagcaagacagtatcatccaacggtacgaggatacgtacacgatgacggtcggcgacttcgcagacgacgtgaacgtgtggctgtcccgtcaggaaccgaaccgccgcatcctgttcctcgtggatgaggtaggccagttcatcggtgagaacagagaactcatgctgtcactgcaatccatcgccgaggatcttgccgtcaagaccaacgggcgtgcatgggtggtggtcacttcccaggaagacatggataccattgttggcgatcggaccaagcaacaaagctatgatttttcgaagatccagggtaggttctccatcaagctgaagctcaacagcgccgacgtggtggaggtcattcagaagcgcttgctgaccaagaaaccggaatatgagtcggtgatgaacgagctgtgggatgagcagaacgcgaacctgcgcaccatgttcgaattcactcgtgagacttcgaaattcagtaatagcaaggcatacagcaaggacgatttcatcgcatcgtatccgtttgtgaactatgagttcgagctgttccagaacgtgctgcgggaaatgagccggtacaacatgttctccggacgccacgcatctgtgggtgaacggtccatgctttccaccatcagcagcacgctgcggtccagccagaatgagatggtcggggccctgatgccgttcgacaaactgtacgacggcattgccgacgccatccaatcaacctcgaacttccgcatcaaccaagctgaaaagagacttggctccgatataaaggaactgggcgtacgtctgctgaaggtgctgctgctggttaagcatgtcgacggattccccaccacaccgcataacctgcgcattctgctgaccgaccagttcgacatggacgtgatggaactggaacggaacatcaagtatgttctgggagagttggaaaaagacacgtatgtgcagcgtgtgggagatacctacaattacctgaccaacgaagagcaggatatcgagcaggagatcaaaagcacggacatcgactccagcaaggaaatcgacgagctgaagaagatcctggtcagtgacgtgctcggcaagatgaccgtggcatacggcgaacagcgtgcccagttccgctatggtttgcgcatcgatggggtgcaacagtccgcgcagcagcccatctggttgaacgtggtcacttcgaccaatgcgcaggaccgtgccgatgccattcgcatgggcatgggtatgcgcgacaccatcaccctgttgctggacatgtccgataaaacattgctcgatgatctgcgcatgtacgtgaagacctatacgtacctcatgcgcaccgacaagaacagccagtcagaagtgcgccagcagatcatctcccgcaagagcgtcgccaatgaaaggctctatgcggaattacgcacccgcatcgtcaaagccgcggccaatggcgagttcaactataacggcggaaaagtggaagtgaaatccaccgaggtgcaggcgcgtatggcggaagggcttggaacgctcataggccggtactacacgaacttttccctacttggtgggcaaagatacgaggaaacggatctcgctcgcatcatcatgaacgcttcgcagcaccagcctggcatgcttgacggcacgaacgcagtgcaggacaagctcgacgttcccgccgatgatgtgttcgccgcggtcagtcgtgacaaagacaaaggcatggtcgctaccgtcaagagccttcttgacacctacggcagcgttccctatggttggccgtacgccgccacgctcgcatgcatcggccacctgtatggttccgacagaatcacgttgacgctggatggcaagccggtgcagcgtagcgaggccgcccgcgtgcttagggaaacgaagaagcaggattccatccgagtggatctgccacgcgtattcgacacgagaaaagtttcacagctgcgtgacttcgccagggatttccttgggctcaccgccgcggacctgccatcgaacgcgattgatctggcggaggccgttaccacgcgacttaagcgggaagcggagagtctgacccagctgcgtgcgcgcaatgcccgattcggtttcgtgcagcagcttgacgctcccattgaaaaaatcaactatgcctccggaatgggcgaggactggctgctcggcgatttcaccgcacaagaaaccgaaaacggttccgaagaactgctcgagtttaaagaagacgtaatcgacccgattgtcgctttcctcaacggctcccaatccaggattcttgcagacggattggaatggctgaaaaacaacaagccgaacatcgactatatatctggtactacggcagcaagcctgtaccaatccgcggaacagctggcaaacgacccgaacatcttccgcagaaccaataaattcaagactgccattgacgatctgcgtgaggcaacagacgcaaccatccaaaccgaacgcgccaacgcgcttaacgacgtggaagatattcgcgccagaatccacgattccaccgaatatcagcacgcaacacaagccgcgcaaaccaaggtcgagacagaactggaccaagtggcggaacgcacgcagcgcataccgttcatctacaaaatgcgcgaaagcgtacacgaactgagcgaacgcacttacccacaactcatcaacgcactagcagcctccgcgccgaggccgaagaccgcgctcgcaggagaggcgcagactccatctactacaccgacggatacgaacattcctgaatcacggcaagaggaaaccccgcgcgtggccgtatcgttcgctaccatcagcaggcctcacaccaaggatgctttggaaaccaaggatgatgtggatgacttccttgatgcctaccgccgtgagcttatcgccgccattgagaacggaaagaagatcctgctatgaacacgtcgaaactgcaagctttcgcaacggatgcgcgccgccagctcatgaacgcggtgagggctcggcttgacgccgcattggtgccgaattccgacgcccaggttgacgacccgcgtgcgttcgcttttctgcagcgtgagatcgaacaggccggtggaagtgagcagggtcgcaagcatgtggtggagcgttatgcgtaccggtggttcaatcgcatcatcgcgttccgttacatggatgtgcacgggttcaccggcacgccggtggtctctccagccggtctgaccagcacgaatggactgccggaagtgcttgcagccgcgaaacgaggcgagtatgacagcagggtgttctcgttgcgtgtgaatgataaggccaaagagcgcattgaaggattgctgagtggttccattttggcggatgatccgcagggccgcgcgtatggtctgctgctgcaatccgaatgccggttctggaatcgtaacctgccgttcgtgttcgaaaacgtcggcaaggaggccggcagagtggatgaactgctcatgccagccgatctgctcgccgagggttccgtgttgaggaatgcggtggaggtcatgaccccggaggattgcggtgttgacgatccgtccggcaacgtggagatcatcggctggctgtaccagtactacatttcggaacgcaagaacgaggtgatggacgggttcaagaagaaccacaaagccggagccaatgagattcccgccgccacccagctgttcacgccggattggatcgtgcgctacctcgtgcagaacaccgtgggcaggctctggatgcagtcacatccagacagccagttgtacaagaactggaactactatattcagccttcggaggatgactccgtcgggaacgaggatattctcaacatccaagcgcctgaagatttgaccgtatgcgatcccgcatgcggttccggccacatgcttacctacgcattcgacctgctgtatgagatctacgaggaggaggggtatgcgccgagtgatattcccggcctgattctcaaacacaacctgtacggcatggaaatcgatgagcgagctgcaagtcttgccgccttcgccctgaccatgaaggcacgctcccgttcccgcagattcttcaagaagcaggtggagccgaatattcagcgcattgtgccgattgcgttcaaggaatacgacgtcgccgagctgaatgacctataccaggtgaatctggactccacggtatggaacacctatgcgaaggcggacgtgtacggttcgctgatccagccgccgcaggagcttgttgatcttgcctcatcggcagaagacactgaagacgaaatcacattggctgattcgcttctgcgtgaatgcgcggatgaggttttcgcccagacaaggtatcttgcccgcaaatacacggcagtagtggcgaacccgccatacatgggcgcaaagaacatgagcggcgagctcaagcagttcgtgcaggaccattacgaggacggcaaagctgatctctttgcggcattcatttatagactgtttgagttggtgcctaagcatgggcagcttggcttcatgactccttacgtgtggatgttcatatcttcctatgagcagatgcgtcaacggattatccgacaggaacacatcagttcgttgattcaactggaatattccggattcgaaggcgccaccgtgcctatttgcactttcactttagaaaaggggcatagtgacaggaagagtgcattcgtcaggctcagcgatttcgtgggagctaagcagcaagggcctcgtgcattgggaatcattgatgcgcacaataatgagcaatctgatcattcggatatgcgcaagtatttcttcgaggtgaaccagcatgagttcgcgcaggttcccggtgtgtcaatcgtttactggctggataaaaaactgattcatatttttaagcttaataagccgctcaaagaatatgcccagcttaaaaatggtatgtcaactggcaacaatgaatcgatgctaagagaatggttcgaaatcgcatttcctgatattgatttcgaatgtccagatagagatgaggttgatatcagagggagaaaatggttcccctataataagggtggttatttccgtaaatggtacgggaatatggaatccattattcgctatgatgaaaaaggtcgtaagcggatggaatctcttaaaggatcgaggcctaatagcccacatttatactttaaaccctgtatttcctggtcaaaggtatcttcaggctcacctgcgtttaggtttttcccaaagggatttgtatttgatgtagctggttgctccatgtttccgacggatgataggctcttggagccgctgctctcgctagggaactcgacgcttgttttagacttgctgactgccctatctccaactcttaattttgaagctggacaactcgggaacattccatatatgcctgagctgacgaataatgctaatccagttttagtggatttaattattgccgcaaaattggattgggactcatttgagacatcatgggatttccagcggctcgcgttgtttgactctacccagggggcacagtcgggtgattcgcttgaagatgcggtacttcatcttcgtgagtactggaaccgcgtgtccgaggaacagcgccagcgtgagatccgtaataacgagatggttgcggacgcgtatggcgtgcgtgatgacgtgccgtgcgatgtactgttggaacgcgtgtcgctgaagcgcaacgtcgcgttcgcatatccgaaggatactccggaagtgcgcaacgagaaattcgcgcaagatgtggttaaggagctcatttcgtatgcggtgggctgcatgttcggcaggtattcgctcgataagcctggtttgattctcgcttcgcagggtgaaacacttgatgactaccatgcacagattccgaacccgtcattcggaccggacgcggacaatgtcattcctgtcacggagacggactgcttcgaagatgatatcgtgacacggttccgcaggttcctcaccgtggcgttcggcaaggagaatctggccgcgaacatcgcctacatcgaacaggtactggacaaaagcatccgcaagtatttcgtgaacgatttctacaacgaccacgtgaagatgtattcgaatcgaccgatctactggcagtactctagtcaaaccagcaacaagggctcgttcaaggcgctcgtgtacctgcaccggtatacgccgaaaaccacgaacgtggtactcaactatctgcgcgactacaccggcaaaatcgccgacatcgccgatagcttggaacattcagatcgtgccgcggaccagaaacaggccgccaaactgcgcaaggccgttctcgagtgtaaggattacgaggaccagaccctgtacccattagctacccgcaacctggaaatggatttggacgacggtgtgctggtgaactacctgcgcatgggcaaagcccttcgcgccattcccgccatcgagcgaaagcgcaaagaagtctccacctggacctggcccgtccatccgctgaaggaacaagacaaggaagtcagtaatggcaaagaataagctcagcatttacctgataaaacaagatttcccagtaggggagatagtccctcctgcttcagataatgggaatcctattatcgaattgcaaattaaggggcatgagagttgcaagctgttcgttcgtgccacaaaaccgcatgaacctgaatgggctaacgcattttttaattcagcagtagaaagcgaatcccttaaagttgccaatattggagcggctcttgtcattccagttctcattgagaataattcgtttgatgcaaaagcagatgaaattttttcgtctgttggtgaagaaaatcggcgttactttgttcttacttttggatatggtcgtacgcttatcaatcgttcggcaatagaggaacgttttggtctgaaatgtgtacttaattctgtaaaaaatgatacattgagagcgattcatttcgctgatgtctcgggtagtgccaagcgttcaagtgaacagttgtcacgaataggagatatcgatgattttgccatcgatactgaaaggaatttgttaagccaggtaacggctaaatgcggagaagatgagttgctgtgtggaacggtgactggcggtgattcgcttgctgttacaaaagaaattgatatagataatgtgcaagaattccttaaatctctctatgaattgttctgtcaagaaacttacaagcaagattttgattgggttgacaatatcgctcctgtaaaagatcccgctctagaacaaaaattatgggacgaatctattcggcaaatcgcaaactatagctataacgatgacagtcagcatgatttgtggatggcggttcctgatattattgattgggatagaatcgaaggtttccaaattgggtctcaaaccgatgagaatgatgagcctatccttcaggatgatgtacttttagcagatgtacttcgttcttttaaaaagcctcttacttctattgaccaacttaaaaataaacgagtaactgctatctcaaaagaaaatggcttgccttatcaaggttggcaagcgcataagtgtcttgttggtgatttggcatacggtggggaatcatattgtgtgcttgatggcgcttggtatgagattcgctcggattaccttaatcgaattaatgaagattttatggatacggacgaatcggatatagatttcattccatatcctcaaaatgatggagaacaatttgttgatgattttgacgggaaaaagataaaacttgagaaggaagggctatataactataagcttgagaaggctcttgctcaaaaattccctaatcattttctcttaatggataaaagattaatttcgtatggtggtggtcgtagccgaattgaattttgtgatgtgcttgctgatgatgggaaaagaattcatataaagcgatattcgggttcggcaacaatgagccatttgtttaatcaggggcttgtttcggcttctatggagcgggatgctgccgattatgcggaaaaagtgaatgaaaaaatcaagcaggttggcaaacaagaggggctgtcctcagttgagaattttctgttgaatcagaatcaaattcatgatgtcgttttcgccattgttcccaagcaagatagtcatagtcatgatcttccctttttcagcaaggttgcgttatgctctgttaaaaaacagctgaagcgtatggggatagagacaaaactgaattggattaaccgtataaataagtcagaagggcaaacgcctaatgagcattgagaccttgttgaatggcgaatccaagaatgtggagtacaagctcactcctccctctaggagtattaactacaccaaaaccgcggtggcgtttgccaatggacagggtggttgcttggtgttcggtgtcgaagaccagacgcttcgcgtggctggtattgccgaagacaaagtgttcacggtgatggattccatttcggacgccatcgtcaatagctgtgagccgctgattattcccgacatcaccatgcatgatgtgaacggcaagacggttattgtggccgagatcgctcccggcttgcagcgtccgtaccatatcaagtcgctcggccaggaacagggaacattcgttcgcgtagctggcaccacgcgtcaagcagaccagcccaccattcgggagctgaccattgaaggcagcaatcggagcttcgaccaagtacaatgccttggattgtccgtaacggaaaaagacattgaagcactgtgcgaaagtctgacaaaaaccgcgaagaataacgccgaagaccccgcaaaagtcaaaacggttacggagaaacagttgctgcaatggggcgtgctggcagaacaggacgggcaattggtgcccaccaacgcttatgcgattctgtctggcaatgaggcagtccgatccgtggtgcaatgcggcgtgtttaagggaaccaccaaagccgtatttgtggatcggcgtgagttcgccggcactccgcaggagcttatcgaagagtcctaccagtatgtgctgcgcaacatccatatgggtgccagattcaagggcgtgtaccggcaggatgtgtacgagattccaccggacgccgttcgagagctgattgtcaacgcgatagtgcatcgcagctatatcgaccattcaagcattcagatcgcgatctacgataatcgattggagatcacttcgcccgggcgcttgccaatggggcagaccattgaacgcatgaagcagggctattcgaaaatccgcaacgaggcattggcctctgcttttgaatacatgggctatatcgaacattgggggagcggcatcctgcgcgttctgcaggaggtgcgtgatgccggattgcctgaaccgaaattccttggcggcgatacggatctgcgcatcaatatctatcgcaatggctcagagacaggttctgatgacgggattgtgacgggattacgacgggattcgctttctgatgacgggattgtgacgggattacgacgggattcgctttctgatgacgggattgcggaagaaacaacttcaaaaacgaatgctgctccgaatgccgccattgcagtggttccatcccagaaagagcgtattcttgatgcgctgcgtaagaatgcgagtatttctatctctgacgccatacggatactgggtgtgcaggaaaggcaggctcaacgaatattgaagagtatggtagaggaaggcagtgcagtgaaaattggtgctgcccgcgccactcgatacgctgaagcgaagaaaaggacggaaccgcatgagtgagaatagccaagtaacaagactgctcgctaaacgtttcagccagccgggcgaacgcgggcgcatagtattttggcgcgacgataagaagcagtacgtggatgatgcggcaacattggtaggcgagtgcgccgccgatgagatactgcgtgaggttgaactcatcactccggaaattggggatgagaatgacaagcggtacattccgttcacggtgcgctaccgcatgttccacgagcagacaaatcaaaaattcctcgtgtatctgacggagtcggctccggcggttcaagacaactggctgttggatttggagctggcatatggccccacgttcaccatggacaaacttgccgtgacacttacggaaacgctgccggaagcttccgccgacacccgaaacgagtggttggaagtgatgaagcgtgcgccgaagttctttgacagcgaagaacgcgccaagcgcttcgcgaaacgtcttaatgcgcacgacgatgccaccgatttccaggcgaagatgatcgccacgctgctgcaactgaaagacgatcggcacagcatgcaagacatctgggctgagctacttacgcaatattcgcagggtgacgcttctggcatcaccgcgattgaacgcatgggattaagcacgttccattggactggaacacgacgcatttatcgttttgatgtggatgccgatgccggcagcgagccgacggtgaaggacttcgtgctatggctgttccagctcgcatggaacggattctccgatggcaggaacgccgtttccgcttatgcgaacattattcgcgactgggacgactggtataagaacatcgacatgcgcacggtgttgcagaatctttccgagaacgccgtggaggaactgcatctgtccactcgaatcgccgacatgagcgtagaagagcttgccggtcgggacctgttccgcgacgtggacgagatgatcgtcaacaagctgttcgaacggttgggttcgcagtccattacggacgaccaagtgcaacggatcatcaacgggcgcaagcagaagctttggtacgcagaatataccgaccaatacgagtgcattgccgcagcaagcaggctccgtgccgttctgactgaatgcggtgaactcatcagcaccatcagctcaccggaacaagggatgaagctgtatgccgaaaagctatacaaggccgatggcgcatacagaagatatgtgctcgcatggcatcgcgccaactcggatgcggtgggtgtggacaatgacctgcaaagcgcctacgaggcatatcagcaggatcttggtcaggcatggcaaaaacaagtcgatacgcttagccaatggaagttcgtagacatgggcgcgcaaaccaatttctatgaacgtgaaatcgcgccgaccttgaaggccggcagaaaaatcgccgtgatcatttccgatgcgctacgttacgaggttgcgcaggaactgtccgaacgcatcgacagggaaagccgtttcagtacgaaactgaatatgcagtacagcgttctgccatcctatacgcaacttggcatggcggcattactgccgcacggctcgctcgaattcgacagcaaagaccgtttatatgttctggctgatggacgcagcaccaaaggaatcgaagcgcgcaccgccattctttcggccgtaggcggcaaagcgattagatatgacgatttgacaaagctgaaagtcagcgaaatcaaagaactatataaatcctgcaacgtgctgtatgtgtatcacaaccatatcgacgccaccggtgatacggagaaaacggaatcggaaacagtggacgcatgcgagaagacgttcaaggaactgggcgaagtagtcaaaaaacttgccagcggcaacgtccataacatgatcatcactgcggatcacggattcctctatcaggaccgagatctggacagtacagaatggttgagcgaacagcccaagggcgatgcagtatgggtgagaaagcggcgattctccatcggatccaatctcgctccgggtcgcgcgttcgtgacattcaatgccgcgcagataggaatggacgatgctcggaatgaaggcataagcattcaagtgccgaactccatcatgcgcttgcgcatgcagggcgccggtgtgaagtatgtgcatggaggagcagcattgcaggaaatcgtcgttcctgtgctgcatgtcagtaaggggcgttccgcggccgacgatgtgaggcctgtggaattcactattctgcaacgaaccgacaggctttccagcagacagttgactgtggaattcttccagaacgagcccgttggaggaaaaatccgcgcacgtaccgtattggccggattgtgggggcgcgatacggcaggcaatgatgtgctcatctccaatgagacgccggtcgccttcgatctgctcggtcaggagaaaagcgaacgccatgtgacggctacgctcatgctgaccagtgacgcggaacgattcaatggaacgaatatcgaactgcgtctgcgtgagaagacagatgggtcaaatgtgctggtcatgcttgaccagaaggcacgatacttcttcaaacagggcgtggtggccgacgatgccggattcttcgactgaattggatgagcacagaggaaagcgaccgtaaggggtaacacaatgaatgagcagggtatgagccagaacggttggattgaaagtcctgaacacaacacggatgggaattccctgaccgcgttggacgctaagatcactgatatgttccccggggtcaccgtccgcaaggatctggtgaacaaggtcaagggcaatgcactggtgccttcatatgtgctggagttcctgctcagcgcatatgccacgaacaccgaccaggccagtatcgagtcgggtgtggatcgagtgcgtgccattcttgcaaacaactatgtgcatcgtgaggaagccaatcttatccagtcgaagatccgagagaaggggagccacaggattatcgaccgtgtgcaggtggtgctcaatgacaaaaccgacctgtatgaggcgacgttctccaatctcggcatcagtcaggtcattgtcgatccaagccttgtaaaggcttatccgaaactgctggtgacgggcatctggtgcatgtgtcagatcggctacgcatattccggcgacccgcgtgaagtgccatggcagttgctacagctcaagcctgtgcagatgtcgcgtgatgatcgcgaaaactacatgcagcaacgtttgcaattcaccgatagcgaatggatcgatctgctgatgcagtccattgggttcaatcccgatctattctccgaccgggcgaaactgctgcatctggtacgcatggtgccgtttgtggaacgaaactacaatctggtcgaactcgggccgaaaggcaccggcaaatcgcacatctattcggaattctcaccgcacggcatgctcatatccggcggggaagtgacagtggccaaactgttcgtgaacaattccaacggacacttggggcttgtgggctattgggatacggtggcgttcgacgagttcgcaggcaaggccaagaaggccggccgggatttggtggacatcatgaagaactacatggccaacaagtcgttctcccgtggcgtcgagacgttccaaggcgaggcgagcatggtgttcgtgggcaacacctcgcataatgtgccgtacatgctgaaaaattccgacctgttcgaggaactgccgaaacagtatcacgatccggcgttcctggatcgtattcacttctatctgccgggttgggagttcgaacagatccgttccgagatgttcaccagtggattcggtttcgttgtcgactatctggcggagatcctgcacaacttgcgcgatgccgattacagcgaccggttcgaaaagtatttcgagttgtcttccacactgtctacgcgagataaggacggcatcaaaaagacgttctccggattgatgaagctcatctacccggacggcaaggccactcctgaacagatggaaccgttgctgcgttgcgccatcgagggccgcaagcgcgtcaaggaccagctgtgccgcatcgactccaccatggaggaagtcgagttcacctacaagcgtgtgagcgacggtgaagtagtcgccgtgcagaccttggaagagcttgactacccgcagttgtattggcgtgggcgtgtagctgagaattcggaagatgagagcgaggcggaatcgtttgttgccggtgatgacgtggcaattgcgggtagcgagggcgaagccggtgcttctgagaacgccaatgcccttcccgtagcgcggcagcaagaaacagccgcgatgactccagtcgagcgccttgcggcaaaggccgacggaaagcagtgggaattggtcgaaaaccaacgtggaatcacgtattacaaactattcgggccatatttggctggtgcgaagaaaatcgttgtagaggatgcgtatgtgcgtaagccgtaccagctgcgtaatctggccgagttcttggaaatgctgctcagatgcaaaaaacccgatgaggatgtagccgttcatctggtgaccggacataatgatcctggattcgtggaagcgcagttaaatggtttgaacgaactggcatcggcgttctcacagctgggcgtgaacctcacctacgaattcagagacactttgcacgaccgttccattaccgcggataccggctgggaaattcttcccggtcgtgggcttgacatcttccagaaattcgttgacggcgattggcttaacccgctgctgcgccatcagcagctccgccgcgttaaggaatgcaaggtcacgtatcagcgggtcagcgagaagtgaggtaaaaatgaatgtccaatgtccagcttgcggaacgtatgtggcagagaccgcgaccatgtgtccgtattgcggttttcgcggtgatgatccgagccggccaatatacaagcagggggagtatcgtcctgtgccaattgtgccttgcgaaatcgtgatggatgatgaccggcgtggcgagatttggttgtctgacgaagacagcaagaatctgtttcggcatttgactaattggaaatggctctcaaccatgcttccggctctggcggaaacattagaaagtatgtttggcggaactgtgcatttggaagccaagcttccggaacatatcatgcgcatgattgaagaggacaaactccatttcgccacggataaaaacggtgagattctcgctgaagtgttcgatgaacgcaataaaatcttcaaacaagtgcgtttggagaaagtcgtcagaaatgatacgttattgccggctatgcagcatcttgaaacacaggctgccctttgcttggtaatggaaaaaatcgatgaagtcggccgagctgtgcaacagcttggtgaggaaatgcagcaggatcgtttggcccgtgtcgatgccgcgtttgatatgttccagcaagcgtgtcgtatcgagagcagtcgggaacgtaatgagtatgtacgtgaagcgttgaacgaggccacgcgcgcgaaggctttgctggtgcgtaattttgcgcagcagcagcggctggtgaagcagagtagcaagaaatcggatgccgcattaagggcaatgcaggattatgtggcgattgtgaatgcagtgaacgtgcagatgcaaacgcatatggcgttggggcaacaggacgtggccgcgtattgtcttcaggatcttaataagttcattaagaactatgatctcgataagcgcgatacgatgctcaaccttgtaggcagcgtgaagagcaagaacaggggcagtaatcaggaaaagtttattgatggttctttgcaggttgcagcgaacattgaaagcgtggtgaaggctctcgacgcgggcgaagtaatctctccgaaactcattaccgagaatgatgggaacgggaatgattctaacgatgaggagaagcagcatgatgaagaaaactgaggatgctgaaaaagttgctgatgaaattgcaggtgttgacgaagaaaatcctgcgtcgaaaaaacgctcttgtatcaagtgcaagatagaactggcttccgacaacaagctgccgttctgtcctgcttgctgggaagaaattaccggctacctgaaaaagaccggaatcgccatgggaacgttgatggtcgctttgataagaaagtatggtcccaaagtcggcaaggcggtcttcatggcgatcaaggcaacattaaagaagtaatcatctacgctttaattgagatgccatagagacgcattgcttgcggtgtcacgtggctgttgttctcatttcatgggaaatgagggtgaaaaatcaatgtttcgagaggtggcaccatggacgctggcaagaaaatcctgctggacttatttaccggttcgcttcggttcgtggttccggtgtatcagcgcagatactcatggggcgaggcgcagtgccggcaattgtgggccgacattgtaacggctggcaggcatcctgacagaacctgaatatttgactcgttggggtccggggttattgcgtttgggggccattatgagttttggtggttattgcgtttcgaggccggggttattgcgtttgggagccgtggttggttaggctcctttcaccatgcgagggacgtgtggtgaaaggagttaccagcaatggtacgaaaaatacaggcgaaactggtgctgcgtttgcatgcccagggtttgtcggggcgtgcgatcgcgaggtcgcagggcatgtcgcgccggagcgtttccgatgtgctcgatgcggcgagggccgtcggcgtcggctgggatgatgtcaccggcaagaccgacggcgaggtgtacgccctgttgtttcccggtcggggtgagcgcgaaagcgtgtacgagcagcccgactgggccagggttcatcgcgagctggcgcgtgtgggcgtgacgttgaggatcctgcacggcgaatacgtggacggatgccgacggaccgggaaaccccatatgggttacgaccggttctgcaagctgtacgccgcatacgtgcagaagttgggcgtgacgagcagggtggagcacaaggccggccgcaccatcgaggtcgactgggccggcaagaccttgcggatcgtggatccggtcaccggggattcgtcaacggcgtatctgttcgtggccgtgctgccgttcagccggtatgcgttcgtggaacccacgctcgacatggcgcagaactcgtggctgcgggcccatgtggcgatgtacgagtggttcggcggttccacgccccgcctggtgtgtgacaatccgaagaccggcgtcatcgcgcatccgcgcgagggcgaggtcgtgttgaacgacgcgtaccggggtttggccgagcactattcggccgccgtgctgcccggacgggtcaggaagccgaaggacaagccctcggcggagaacaccgtatggcacgccacgatggcgttggccggcgcgatgcgcgaccaccagttcggctcgttggacgagctgcggaccgcgatacgcgcgtggctcgtggaatacaattcccgcccgttccagaagcgtgacggatcacgtctgtcggtgttcgaaggcgaggagaagccgctgctgatcgcgttgcctccggtggcatacgaggtgatggactgggtgtacagcaggagggttcaggccaacagccacgtcgcctatgctcgcaactggtattccgtcccgtacgcgtacgtcggctccaccgtggacctgaggatcggggcgaacacgctcgagatctggcacaaaaataccaggctctgcacgcaccggctcctgccggcgtcggcctccaacaagtattcgacgaacggggccgaccttcccggcaaaaccatgtggaagccgtgggataggaaacgatgcgagcagtgggcgaacaggatcggacccgactgcgccaccgtcataggcaaactgttcgccatggaacgtctcgacgaacaggcggtggaccccgcgttggcggtgctgcgcctgtcgaaacggtattccgcgcaacggttggagaacgcgtgctcgctggcgttgcagtcggtcgcctcgccccgctacgcgcatatcgggccgatcctcgaatccggccaggatatcgcgggcgagatccccgacgacgccggcgatcacggcgccgacggcggggatgacggtgccggttgggtgcgcggcggcgactactacgcgaacatgggcaggtgagacgcaatgatcatcgacaccgagaccaaacgcaagctgcgcgagatgaacgccacggacctgctcgacgcgttcgaacgcctcgacgaacaaaccaccatgccattgagccacactgaggtgatcaggctcgccgtcgacagcgcgcactccggtcacatggacgccaggatccaacgcctggtcaaacgcgcgggactgcgctatccccaggcggacctgcggaccatcgacctgatggaggagcgcgggctcgaccggagcgtgatcgcaggcctcgacgccggaaactacctcggccagcggctgaacgtcgtgttccagggagccaccggatcgggcaaatcgcatctattgtgcgcgttggcgaaatccgcgtgcagaggacggtaccgcgccatatacgtgcgcatgcccgacctcgccgaacaggtgacggccgcggccggcaaaccgggaggcgtgcccaagctcgtgcgcaaatactccacctacaacctgctcgccatcgacgaatggctcgtcgacaagcccgacgaaccattcaaacgattcctgctcgagctcatggaactccggtacgacacggccagcaccgcgttcgccacccaactggcgaccaaggaatggcaccgccagcttggaggcgacaccatcgccgacgcgatcctcgaccgcatcgtgcacaacacgatctggattaataccggcgaatacaacatgagacaacgccacggacaaaccatgctcgacaactaacccaaaaggccggtggcccccaaccagtccgccaccggcctccccgcaccataaccccggcctccaaacacaataaccagtggcctcaaaagctacgaatattcaagaacccatttcatcggatcgatcgtatggatgcaggaaggcggcatcggcccggatggtgtcagccggtgtctgctcatcgatggccagcagcgcctcacctcggtgaccctgctgcttatcgcactggccgaatatgctcgcgaacaccctgagaacctgcgattctccacagacatgctcatcgaccgtggctatctggtcgacaagtatgcgactggtgaaggccgctacaagctgacgctttccgacgacgaccgggacgcgttgcaacgtctgtgcgaccatgcggtcgaccccaactgaatatttgattcgttgtggtccgttgttattgcggttgggggccattacgggttttggcggttattgcgtttcagggccatggttattgcgctttgaggacatggctggttaggctcctttcaccatgcgagggacgtgtggtgaaaggagctgccggcaatggtacggaaaatacaggcgaaactggtcctgcgtttgcatggccaggggttatcgggacgcgcgatcgcaaggtcccaaggcatgtcgcgccggagcgtggccgatgtgctggacgcggcgaaggccgccggcatcggctgggatgacgtcgccaacaggccggacgacgaggtatacgcgctgctgttccccgggcgcggggaacgtgggagcgtgtaggagcaacccgactggggcaaggtccaccgggagttggcccgtgtcggcgtgacgttgaggattctgcacggcgagtatgtggacgaatgccggcagtcgggtaggccccataggggttatgacaggttctgcaggctgtacgccgcgtacgtggtgagactcggcgtgacaagcagggtggggcataaggccggccgcaccatcgaggtcgactgggccggcaaaaccatgcacatcgtcgattgtatttagtcaagtcggtgttttgggtttggtcatgtagtttttcgggtttgttcatggggcgtgccggccgataacgcccgaattcttgcgcactttcggattccggccctgacgtaagagggcatggcccgcgtcctgtgtacgattttcattcgccaaaacaaaaaaccgcgattggaagccaggagacggaaccatgcccgagaacatcatacagatcgaccagaacctgctcgagaccaggctcgaccggctgatcaccgagaagatgacgcagatcctcaacgcgatgctcgacgccgaggccgacgagatcaccggggccgccagatacgagcgcagcgggggacggaaggcgtacagggccggccactacgaacgcaagctcaccgccaaggccggcaggctcgagctgaaggtgccgaaactcaagggcgccctgttcgagtccgcggtgatcgaacgctaccggcggcgcgagcagagcgtcgaggaatccctggtcgacatgtacctggcgggcgtgagcacccgccaggtcgacgacatcagccaattgctgtggggagaccgcatgccctcgcagacattgagcgacaagctcaaaaggatctacggggagatcgaccagtggcgcacgaggccgttggaatccgaatacccgtacgtgttcgtggacggcgtgtggcacaagcgctcatggggcgggcacgtggagaacgtgagcgtcctggtcgccatcggaatcaacgcggaggggcatcgcgaggtcatcggcgtcacggagggcatgagggaggactcggccagctgggagcagttcttcagaggcatgatcgaacgcggcctgaagggcgtcaggctcgtggtcggcgaccggtgcgccggactggtggccacggtcggctcgatgctgcccaaggcgaagtaccaacgctgcatggtgcatttcatgcgcaacgtgctctccaaggtcccgccgatccacagagaatgggcgtccgccgccctgaaggcggtattcgccatggaaagccgggaatccgcgctggacaaagccgaacaagtcgccgcggagatgaggtctaggaggctgagggccgccgccaactgcctgcgggagggcgtcggcgagacgacgacctacctgctggacgagttcccggacgggcaccgcaggcgcatccgcacgaacaacatgatcgagcggccggacagggagatccgccggcgcacgcgcgtcgtgggcggcttccccgacgggaacagcgcgctcatgctcgtctgcgcgcgcatccggtacgtcaccgcgaacgaatggtcgacccgccgctacctcgacatgtcccggttcgatgacaacctcgtggaagcgaactgatcatcgctccatggacggccatgatccaaagtgcgcaacttttcgggcactacctgccggccgggttggttggttattggggttggtttttgccgaacatgagcgcctcgccgatgcggtggctggggccggtgaattcgatgagccgttcgtggtggacgatgcggtcgatgatcgcggcggcgagtttgtcgtcggcgaagaccgtgccccatttgctgaactcgatgttcgtggtgaggatgatgctgcgtctctcgtacgagctggcggtgacttggtagagcaggcgggcgccgtcgatgtcgaagggcgcgtggccgaattcgtcgaggatgagcagatcggctttggagatgtccttgggcaggttgtcggggttgccgtcgcgtttggccttgcccagttggagcacgaggccggcggtgggaagaaacccgacgttcatgcccttgtcgacggcgagcatgcccagcgcggtggctaggtgggtcttgccgcgtccggtctttccatagaagaccaggtcctgggcatgccgggcgaggtcgagggagagcatctcgtccctggtgtagccgtcgggcagcctcacgtcggagaagtcatagccgtctgtatttcgtcaaattgaggtggacgtgttcggcacttaatctggacaccgtcggcgttcaacttggacaccgtcggcggttggttccttgttttgttgtttgtttggtttatttcatgagggggtgtttgttccggtaggattcgccgtggaagcggaggatcctgccgtggtggacgatgcggtcgatgaccgcggcggccatgtccccgtcgccgaacacgtcgccccatctgccggactcgaggttcgaggcggagatgacgttgcgggtctcgtagctgtccgcgatgacctggaacaggagcctggccccgtcgatgtcgatgggcaggtagccgagctcgtcgatgacgaccagcccggccctgcctatcgacttgagctcggcgtccaatctgttgtcgtccttggccttcctcaagcgcatgaccaggctggaggcggtgaagaacctcacgggtatcatgcgttggcatgcgagcatgccgatcgcgatggccaggtgggtcttgccgcagccgacgtcgccgtagagcacgaggtcctcggcccggtcgacgaattccaggctttccagctgttcgcgtccccagtcggcggggaacgaggccatgcccccggtcgtatccctccagggtcttgctctgggggaacccggcctgtttgagcagccgccgccgtttggattcggcccggctcgcgttctccttctcgaacaggttggccaggaagccgagccggccgggcgtggcgtcctccggggccttcccgggcacgctgtgtgtcaacggcaggttgcgggcgaggcccatgacctgttccggcgtggccttgtcaagaacgcggccgccgcgctgctgcggtttttgctggctcattcggcctccttcatgtatttgtcgtaacgcttcaaatcctgcccgccttcggttcccgcaccctcgaggatgcgtttggcacatgtgccgatcgccgcgcggtcgacggtccgtcccgcgttgatgacggtttccaccgctttgaccgtggcggcgaacccgcagtcggcggcaacggctcggatgtcgtcgagcagatcggagcgcgtgcgtgcgtccatgcggtcgagcagggctcgcacggtttcggggaaatcgttcctgatcgggctttcgccccatatgcggggctttcgcgcgatgatcgcgagcaggctcgccggatccacctgggttttcgccgaatggccccaaatcctctccggcgtgatgatcgtttcgccgtcggggccccgcagtccgatctcgaagacgcgcaccccggcctgcaggcgcatggaacgccatttcggtccggccggataccggttcgcgtcgatcgtggcggcaccggtcttgtcggccttcacgctcctccggtcgcacgggtcgaaccgcacgccgggcaatggaagcatgtggtccttctccgcctcgaacagttcgatcaccggaacatcatgccggtagtgatccgatccggcgacgcgttcgcactcgtcaagccacacgcgcgtcagcgtttggaagctctcggccgacggcatcggcaccatcaggttgcgcctgacgaagccgacggcgttctccgcactgcccttcccgtggccggaatacgggtcgcggaaccgcggctcgaaccccgtaatgcgcgcagaacagggagaacaagcgggtccgggcggccgtgccgtccggcctgcgatggcccacgccggtggcgttgtcgaacaccaccaccctaggcgccatgcccatgcgctcgaagatccacagcaaaccctggcacacgcactccgaggtctcgccgggaagggcgaccacccagcgcatgttcgaatacgggaacgacaccaccaggaaatgcgccacgcgttcgactccggcgaccacggccctggcctggccgaaatcgacccgcgcgcttcccggcgcccactccaactcggcgaagccgtccgactccatgcgatgctcccgccgccagcgcttgacccagcgctgcaccgacgaatacgagcccgtgaacccgcactccgccacgagccgctcgtacacgcgcgtcgcggtgtggcgctgcttgacgggcatgcgcagatccgcggccggccacccgtccacgacggccgaataccccgcgtcgaccagcgacctgcccgcatgccccgagccaaggggcttgggagagtaatccccgtggttggcgtacctggccacggtcgtgcgcgatacgccgagtttccgcgatatctccctgtggcccaggccctggcggtcgagctgcctgatacgctgtcggacacacaccggtgtcgtcatttcctttcctcccgagaaccatcagtttggttgacaggcactcgggaatctaccaaggaaccggacgatgccggtgttctcattccaccggcgccatcaccgccgacaccgtccaaattgaacgctcagggtgttcaggaacaagtgccgacagtgaacacctttattcgatcacacacacccaacggccttcgccctgaactccggcgtgcatcccgcgcccttcgccatggccccatcatctcccatcgagccaggggaaatacggaacaaaaaacagttcatatcaggatgattttggagttggggagggacggggttgtggggtgcggttagagttggcgattagggcgttcgcgccgaattatttgggtttgatgactttattcgagagaggctgacgaatggtttcgccacatcatcttttgaagattgcgactgcgctgtctgcggttgcgttgacggcttccgtcgcggttacgccggcttacgcattgcaggatatcgcgattgaggatgctgtcgcgcagagcggtcccgttactgcagataatggcgttgttgtgcagtctgacgatcagtctgacgaccagtcgggcgaccagcagtcgcaagacagcatgcctgacaatccgaatgcgaaacttccaggcactgtcagtgacgagatttccgacgatgccaccgtggtttcggaagacctggccgtcacccctgaaggtgaggtcaagaatattgaaaccggcgaaaccgtgaccgatgcgacactggtcggtacgcaggatcagcagccggatccgctcgccaaaaccaatggcgaatccttcattccggtgagtgcggaagatgtcaaaaatgctgtagccgacgcgaacgtacagctctccaaattcgaaggcaatgaatacggcgcgcactggggcacttacaacaatacgaaagccttcttcgactaccagaacaacctgttcgtgcagcaagccaaaggcgtgatcgacgtttccgaatggcaaggcgacatcgactgggccaaagcgaaagccgacggcgtggaaggcgtgatcatccgcctcggctacggttggggcaacaatgctgacaggaaagcacaacgcaacatttccgaatgcaagcgactcggcatcccgttcggcatctactggtattcctacgcggacactccgtcgattgccaaagaagaaggtgccggcgtggtcgccaaactcaagcgattcggtgtgcgcgcgagcgacttggcgtaccccgtgtactacgacctggaaaagtggacgtggaaggggcatcagccgcccaccgatccgaacgtgtacagcgatatcgtcaacaattggtacggcgcgctgcagtccgccggatacaagaacctgggcgtctactcgtacaccagctacctgcaaggcccgctgaaacatgccgacatctacgccaaaaccacgtgggtggcgcagtacggcgctcgcatgggattcgactcgttcccgaccaacagtcgcggatggcaatacaccagctccggcaaagtgggcggcatcaggggcaatgtggatatgaatgcgtttgggaataaggagtatgtgaatggcgggagtagcaatgatttacaagcggccattgatgtacgcaaaatgactgcagttaccattccgaatggcaattattacatcaatgttcgttccaaagtcgcgtccagcgttgatattcctggtggaagtgccgcagattccaccgccattcagttgtattccggcaacagttccaaggctcagcagttcacttttactaggcagtctgatgggagctatgagatcgtcaatgtgaattccggcaaggctttggacgtgcgtaatggtgttgctgagaataacgctgtagtgcaacagtattctcgaaataattcccaggctcaacgatggtttattcgtgattccggagcgggatattatttgcagtccgctctcggtaattgggttctggatttgagtggcggaaatactgcgaatggtgctgcgattcggctgtatgcgcccaatggcactgcttcacagctgtttgttgtttcgtcaagcgatgtcaatatagctactggagtgtcgatgattatcacttcggttgcgaataaaaaacttgtcacggatgtgacgggtgcgtcaacggcgaacggggcgcgagttcagctttattcaagtaataatacgaacgcccagaaatatcgatttgaatcaatcggcaatggaacttacaagattatcaatgctaattcgggcaaggtgctggatgtggctggcggatccactgctaatggagcggcattgcagcaatatacgagtaacaatactgttgctcagcagtggacggtgcggaattatggcagtggcaggattgcgctggtgtcggtgaacgccaacaaagctgtcgatattccaggtggcaatgccgtgcagcaggctcagctgcagctttattcgccgaatggcactgttgctcagcagtggttggtcgcaaaggcgccgttgacgttgcgcgaacgtttgaacgaaaccgcagccaagcataggcaggatctgccggatggcacctacacgttcggatcgaggcttaatacgtccatgaagatggatgtaagcggcgcttcccgttcaaattatggaaacgtgcagatctgggcgggtaatggaaccaatgctcagaagtggaaagtgacgcatgattccaacggatacgtgaccttgaccagtgtgaactccggcaaagtgttggatgtgaatggcggcgtatctgccaacggaaccaacgtgcaacagtacgattccaatggaacatacgctcagaagtggatagcagtcaagaattccgatggctcatacacgttccagtcggcgctcgcggaaaacaaagttcttgatgtttcgggtgcttctacctcgaatggtgccaacgtgcaactgtataccgcaaatggcacgaatgctcaaaagtgggtgaaatagcagacagattaaccaatagaatatggctgaggacaagtatctttttgctctcagccatatctggaatctgcgctatttctggcgccgcatcatggcgaattgattggcgtcaatgatgaatgctttgcggtcgtttttggccatgacatcgaggatgatgccggtgatgaacaatagcagtccggcaatgacgagcatgacagcgccgataagcgtggggaatcgcgccaccatgccagtgtgccagaaatccacggtcacgctgccgcacagcacgatgccgatgatgccgaggatggcgccaagtccgccgaaaaacggcagcggcttgtattcgcgaatcatgcggaagatggtgctcatcaccttgatgccgtcgcccacggtgtcgagcttgctgaccgaaccctcggggcggtcccgatactgaatcggcatctcaaacaggcgcagattgttgttcaacgagtgaatggtcatctcggtctcaacttcgaagcctcgcgaaagcaccggataggttttgacgaacgtgaacgagaaggcacggtagccggtcatgatgtcggtgacgttcgcatggaacaggccattgatggaaccacgtaccaaacggttaccgaagttgtggaatggccgtttgttctcttggaagtaggtggagctcaagcgatcgccaatcaccatatcgtagccttcgaggactttgcccaccatggccggcgcggcgtcggcggggtacgtatcgtcgccgtcggccatgacgtacacatcggcatcgatgtcctcgaacatggcgcggattacgttgcccttgccctggcgcggttccttacgcacgatagcgccttctgacgcagcgatatcggcggtgcgatcagtggaattattgtcgtaaacgtagatgtctgcttgtggcaaagacgctttgaaatcgcgaacaaccttgccgatagtcacttcctcgttatagcaaggaagcagcacggcgacggtgggagattggttttctggcacaagcatcactataccctattactgtggattactgtggtttttaggctggcaggcgtctctgatgattcggttgagaggcgaatgatgtgaatcggtttgtgtcgtcaccgttcgacttgcgtgtgaggccgtattctcgactccgattgaacccattgtgtatttggtcactgacaagtatttcgtcgtattacttgtggaaagtatgaatgatgggtcgccggaacgcgcatagtagtggacgcttcgtatcattgagcacacgaagccggaatgagcgaatgtgattttcggtcggtgcacgcgaggagcgtgtttggaaatccggtagcagagaattggaagacgtttggaagttcaaaatgagaaggccttgggcgcgcaggccgcaagcgcgaaacccccaaatgtgaaagcggcgcccgcccaatgggtgcgtttggcgttgacattgctggtcgccgccatcatcagctgtgtttgcgtcaaagcatatccttggttctccgcgaaggtgttcaaccttacgcttgccggcgtcgatctgcatatcaaactgttgcggctcgccatactgttccctatctggacgttggtgtgctcatggttctcgtttggccttcccacggtaggcgactggctgcaccgcaaccggttccgtctgggtgtggccatcattctggccgcggtagtgttgaacgtcaacggctcctcgatggccgtgtggaacatctggcttggccgaaatggtacccaggatctcgtgttcggcacaccacgccccatccgcaccgacgaatatgtggtcggcaccccgctggccttctcgcaggcatacaacaactacggctacttcaacggactattcggtgataagccggctgacatgttcatcatcaaggacgctccggcatggttccccaccgaagtgttccgcccattccactgggggtacctgctgttgggtagctccgcgggattggccttctactggtcggcacgactgatcgtcctgttcctctccacttatcagttcttcctgtgcgtcggcagcgacaagaagcccgtctcccgtcccatggcggttttcggcgcttcgctcatcaccttcgcgccgctcacgcaatggtggttcgcggtcaacggtttgccggaaatgctgatcgcggtattcgtatccatctgctgcttcgactacatgctccaacggcaggagacgtgggtgcggctgctatgcggtgcggtaatcatgcagtgcgctggcatgttcatcctcacgctgtacccggcatggcagattccgatgggttacattcttctgggcctcatcatcgccatggtgatcaggcactgggggaagattcgcttcaagcccgtccaaatcgtcggactggttgtgataggactcgttttcacaacattgctgggtttggccctgctgaaatccgctgacacgatccgtgcgatgatgagcaccgcctacccggggtcgcgtatgtcgaagggcggcggccaatccccgctgctgatgttctcttccttggccacgctttgcctgccattcaaggatttctacgagagcgcaatgctcgctggcaacaatgtggaagttgccgcattcatcgatctgtgccctctgggcatgctgttcgcggtcatgaacatgattaagcgcaagaaagccaatttcctcgattgctatctcatcgcgttccttgtgtttatgtccgtatttgccgttgtcggattccctgcttggttgtcaaagctgacgttcatgtcatcggtgaccagcagcaggaccacggtcgccattggcgtatgcaacatcatcctgctaatcaggtgtgctcgggaatggtgcgccaaccattccgtgaaggccaaggctgtggtcgccgtggtgtacacggtatgcgccgcggtgatcgcatacatggtcttcagtccgtatctggatgtcacgatgaccgtatcgtgcgcggcagccgggttcgtccttgcggcggctgtggtgtcgtgcgatttgaaggtcggtaagatcgtcgcaacccttgcaacattggttatggccttctccggtcttgcaatcaatccggtgcagtactcctccacgccaatcaccgatcaaccggtggtccagcaggtgcgcatactgcaggagcataagcctggagtatgggtcgcggaaggcggtaactgcgcacgtctggcgaatctgctggtggcgaacggcgtgaagacgttcaacgccttggcggttaccccggacctgcaaggcatgaaacgcctcgatccggacggcacatggcagcgcatctacaacagatacgcgttcatcagcatcaacattgtcgataagccggcggagaaaccattcgagctctccgccagcgatgcgtatacgattaccgtgactcctgaacagctggaacggttgggagtgacctacgtactttcaacgaacgatctgaacaagcgcaggttcgacgggtatcgtctcgtgaagatcggcgagacggtcagcggggagacgccgtacgaagtgcagcggattaactaatcccaagtcgagttctcgattgctgcaggcagggagcggggagaacggctccgttcgccccgccgggacttggcgtacatacaacggcaaggctaagataaagttctatgtctgaagaacttttcactcccaagaacatcatcgtgaccggtggctgcggtttcatcggatcgaatttcgtgcattacgtggtcgacaaccatccggacgtgcacgtgaccgtgttggacgctttgacctatgcgggcaacatcgagaacatcgccggtcttcccgaagaccgcgtcgagttcgtgcacggcaacatctgcgacgcggagctgctcgacaggatcgtgccgggccacgatgcaatcgtgcattacgcggccgagtcgcacaacgacaacagcatcgcgaaccccgagccgttcctcaagacgaacgtggagggcacgttccgcctgctggaggccgtgcgcaagcacggcatccgctaccatcacgtgagcaccgacgaggtgtacggcgacctggcgctggacgatccggcgaagttcaccgagtccaccccgtaccatccgtccagcccgtactcgtccaccaaggccgccagcgacatgctggtgcgtgcgtggacccgcacctacggtttgaggaccacgatttccaactgctccaacaactacggcccgtaccagcacgtggagaagttcatcccacgccagatcactaacatcctcgagggcatccgcccgaagctgtacggcaagggcgagaacgtgcgcgactggatccacaccgaggaccactccagcggcgtatgggccatcctgacccggggccgtatcggcgagacctacctgatcggcgcgaacggcgagaggaacaacatcaccgtgctgcgcatgatcctgaagatgatgggccagggcgaggacgcgttcgactgggtcagggaccgtccgggccacgaccgccgctacgccatcgactccaccaagctgcagaccgagctcggctggaggcccacgcacaccgacttcgagtccgggctgagggccaccatcgagtggtacaccgagaaccgcgcctggtgggagcccgcgaaggccgccaccgaggccaggtacaagcagcagggccagtgagctgtagatgagtgatgaggctgagctggaagcattgcttcgccagttgattgtggactgggagaacgaagtcgttgaattcaaagcggctggagaagattattcgactggcacaattgggaaatatttttctgctttatccaacgaagctaatcttagaggcaatgcttcggcttggctggtgttcggtgtagacaacaagacgcacacaatggttgggacgaagtacggcaaagagccggaacgtttgtcgcaactgaagatgcagattactcgtgataccgagccgcgctcatcttttaaagacattcatgagttgaatcttcccgaaggaagagtgctcatgtttgagattccacctgctccaaccggacttcctgtatcatggcagggatattggcacgggagaagtggcgagagtcttgttgccctgaccgcagacaagatggatcgtatccgaagcgaaactgacattaatgattggactgcagaaatagttcaagatgcttcgctaagcgatttggacgaggaagctatgcgtcacgcccgctcggcttttgcaaaggctcatgcgaaccgtattagcgaagaagaaatcgcttgttggaccgatcaggagtttcttaaccgtgctcgtgtaaccaagaacggtcaattgactcgtgccgcattactcttgctgggtaaacctgaagcagttgataaactgccagccggcatgtttgaaatgacatggaagctggtgggacaggagaacgcttatgaacattttggtttgccatttctgctgagcacaacgcggctgtatggtagtgcccgaaaagttgcgcactttggatcatggccgtccatggagcgatgatcagttcgcttccacgaggttgtcatcgaaccgggacatgtcgaggtagcggcgggtcgaccattcgttcgcggtgacgtaccggatgcgcgcgcagacgagcatgagcgcgctgttcccgtcggggaagccgcccacgacgcgcgtgcgccggcggatctccctgtccggccgctcgatcatgttgttcgtgcggatgcgcctgcggtgcccgtccgggaactcgtccagcaggtaggtcgtcgtctcgccgacgccctcccgcaggcagttggcggcggccctcagcctcctagacctcatctccgcggcgacttgttcggctttgtccagcgcggattcccggctttccatggcgaataccgccttcagggcggcggacgcccattctctgtggatcggcgggaccttggagagcacgttgcgcatgaaatgcaccatgcagcgttggtacttcgccttgggcagcatcgagccgaccgtggccaccagtccggcgcaccggtcgccgaccacgagcctgacgcccttcaggccgcgttcgatcatgcctctgaagaactgctcccagctggccgagtcctccctcatgccctccgtgacgccgatgacctcgcgatgcccctccgcgttgattccgatggcgaccaggacgctcacgttctccacgtgcccgccccatgagcgcttgtgccacacgccgtccacgaacacgtacgggtattcggattccaacggcctcgtgcgccactggtcgatctccccgtagatccttttgagcttgtcgctcaatgtctgcgagggcatgcggtctccccacagcaattggctgatgtcgtcgacctggcgggtgctcacgcccgccaggtacatgtcgatcagggattcctcgacgctctgctcgcgccgccggtagcgttcgatcaccgcggactcgaacagggcgcccttgagtttcggcaccttcagctcgagcctgccggccttggcggtgagcttgcgttcgtagtggccggccctgtacgccttccgtcccccgctgcgctcgtatctggcggccccggtgatctcgtcggcctcggcgtcgagcatcgcgttgaggatctgcgtcatcttctcggtgatcagccggtcgagcctggtctcgagcaggttctggtcgatctgtatgatgttctcgggcatggttccgtctcctggcttccaatcgcggttttttgttttggcgaatgaaaatcgtacacaggacgcgggccatgccctcttacgtcagggccggaatccgaaagtgcgcaagaattcgggcgttatcggctgtatcgacgaatcaggaatattcagttacggttgcttcctccgggacagttaatgccgcaggaagtgtcgaaatatgacgagcaatccgttatggaagctctgcataattgtattgcgcatcaagattattgcagaggcgcgcggattctggtaacagaatatccggaccgtctggttttcgataacagtggttccttctttgaaggacatccagatgactatatcttgggagataagtctcctgatcgttaccgtaacccatttttggtcagggccatgggtgagctatacatgattgatcgtatgggatacgggattaagaggatgaacgaagtccaagccggcaggtatcttccgctccccgattatgacctgagtgaagtgagcaaggttcgtttgaccatgtatggcggagtggttgaccaggagtacactcgcttgcttctgagcaacactggtcttccgttgcctgatgtgcttgcattggatagagttcagaaaggaatggccattccagaagatgttgtcgcgcgtttacgaaagaagaagctgattactggaagaaaaccgcatcttcaagttgcgccggtaattgctgcagcttcggacactaaggccgaatatgtgaaagcacataatcaggacgatatgttttaccagaggctaattattagctatcttgaggaatttggttcggcctctcggcaggatattaataagttgttgtttacgaagctgggcgatatgctcacagatgacgaaaaaaacaaaaaagtcgggaatcttctgacttctttgaggagagaggggcgtattttcaacgcgggatcgcgaaggtacccagagtgggaactgaagcaaggcttttctgcagaataggagatttcagaataagaaatggacttctgcagaataagactgttgggaaacagtcgttttctattctgctgactactatttgagcagaataacaacatcaaggaatgggactcatggattttgagaaggaactgaaggtcgagaggacgaacatccccggcctgatcgtgttcgacctgccggtgcacggcgacaaccgcggctggttcaaggagaactggcagcgcgcgaagatgaccgcgctgggcctgcccgatttcgggccggtgcagaacaacatctcgttcaacgcgaagaagggcgtgacccgcggtatccacgccgagccgtgggacaagtacatcagcatcgcgaccggcgcggtgttcggcgcgtgggtcgacctgcgcccgggcgagagcttcggccaggtgtacaccacccgcctcgacccgtccaaggcgatctacgtgccgcgcggcgtgggcaacagcttccaggcgctcgaagacggcaccgcgtacacgtacctcgtcaacgcgcactggagcctcgagcagaagaagacctacaccttcgtgaacctcgcggacccggagctggacatccagtggccgattccgctggaggagtccgagcgcagcgaggccgacctgcaccacccgatgctcagggacgccaggcccatggccccgcgccgcacgatggtcaccggctgcaacggccagctcggccacgccatccgcgactacgtggaggagcacggcctggagggcttcgagttcaacgacatcgacacgttcgacttctccgacccggcccagtacgaccggttcgactggagcctgtacggcacgatcatcaacgccggagcgtacaccgcggtcgacagggcggagaccccggagggacgccccgtggcgtggaaggccaacgcgcagggcccggccctgctcgccagggtcgcccacgagcacaacatcaccctggtgcacgtgagctcggactacgtgttcgacggcaccgccgaggagcatgacgaggaggaggcgttcgcgccgctcggcgtgtacgggcagaccaaggccgcgggcgacatcgccgtggcgaacgcgccgcgccattacatcctgcgttccagctgggtgatcggcgagggacgcaacttcgtcaagaccatgatggccctgtccgaccgcgtcgcggacgcgcgggacggcctggacgaggtcaccgtggtggacgaccagtacggccgcctgaccttcacccgcgacatggccgaggcgatcttccacctgctcgactccggggcgccgttcggcacgtacgacctgaccggttcgggcgcggtgaggagctgggcggacatcgcccgcaaggtgttcgaccaggccaacggcaacggcgacagggtgcgcccgatctcgaccgcggagtacttcgcgaacgcgaaggccccggtcagcccgcgtccgacgcattccgccctgtccctcgccaagatcgagaacgccgggtaccacgcgccggattgggaggaaaccctcaagacatacgtcgccaaggaacttggcaagtaaggcatgagaagtcgagaaggccaagatttctcgacgaatccatgaataacgagatgctccggaatccatcccggagcatctcgtttatgtatggtctgtgtggataccccctatggaggtgcgccaacgtccatatgcaggcattagggtgtgtttacgctagttgggtttttggctgtgttttttcaggtaggtggcgatgaggatgagccggaggtcggcgaggaaggcctcgtcgagcctgtcgtagcgggtggcggccttgcggtagcgcttcgtgcggttgaagatggattggcaacggtgtgttggacaggttcttagaggacgagtccctgttcggtgaattccttcggactccggtatccgagggtggagtggagtctttggttgtcggaccaccacacatagtcgttgaggtcggagcgtagttgttccaggctggtgtagtggttccggtatatgagctccttcttcaggagcctgttggtggattcgaccacggcgttgtcgtacgggttgcccttccctgacggcgatcttctgatgtcgaacacgtcgagcagctcgtcgattttcgcgttgtcgaactcgctgccccggtccgtgtggaacacctccacctcggtcagggggaagtcgagcgtggcgaacgcggccatgaccaggtcggcggtgcggctcgtgtcggcgctgtggccggcgatgctcctgttcgccaggtcgatgagcaggcacgcgtacgcccacttgccgccgacgcgcacgtacgtcaggtcactggccaggtgggtgcgcggctcgtagccgtcgaactcgcggtcgaggatgttcgcgagcctggcctcgttaacccgcgtcttgtgtggtttgaacgttctgcgcgcgtacgcgctcgtcatgccccgccgtttcatgatgttgacgatgcgccttctggaggcggtgacgcccctccgctccagcgcggccttgatcttcccggcgccgcagcgctcatggctgtcgcgccagatcgcgtgcacgtcgccggcgatcgggtccacccgcccggcttcgggatgttcgatcatccagtagtaggtggagcggggaacgcccagtattctgcactgcgccgatatcggacagcgggaggcgttggcccgtatcactgctactttcgtgcgaataccggcgccgcctgttctgaaacgtccacctccatctccaactgtctgttgcgcttgcgcagctcgatcagctcgttctgctcaggggtgcggttgtcggcggctttcgtggagccgctgttgcggatgccctggacccaacggtgcagcgtggaatgcgagatgtcgtactcgtccttgatctcgcgcgccggcttgccgttctcgtaaagctgcacgatctgccgcttgaacgactcctcgtagtggcggggatgcttcgggccggccatcgtcggcctccaatctcatgtcattcgtccctcatcggactgtctaatacattgtagccaatccagtctggaaagcttgaacagaaacgaatccggattcgcccagtgaatgcaatgaaaccgcgcagacttcactgcgcggttttcatataggtggcgcggctattaagctggaaccgcttacgaagcttcgtgaaggtatcggagaaagaaagcaggtcgtgttatgaagggcatcattcttgccggtggctcgggaacccgtctttacccgctcaccacggtgacatcgaagcagctgcttcccgtgtacgacaagccgatgatctactatccgctgagcgtgctgatgatggccgggatccgcgacatcctgatcatcagcacgccgcacgatctgccgaacttcgagcgtctgctgggcgacggcagccagtacggcgtgagcttctcctacaaggtgcagccgagccccgacggcttggcccaggcgttcctgctgggcgaggagttcatcgacggcgagccgtgcgctctggtgctgggcgacaacatcttctacggcaatggcttgggccgcacgctgcgcaaggcggctgcggccgagcatggtgccacggtgttcggctactacgtggacgacccggaacgctacggcgtggtcgagttcgacgagaacaagaaggccatctccatcgtggagaagccggagcatcccgcgtccaactacgcggtgaccggcctgtacttctacgacgagcgcgtggtcgagttcgccaagcggatcaaaccgagcgctcgcggcgaactggagatcacggacctcaacaggatgtatctggaggacggttcgctgaacgtgcagacgctcggccgcggctacgcctggctcgacaccggcacgatggactccctgttcgaggcgggcgagttcgtgcgtaccgtgcagcgggcgcaggggctgccgatcgcggtggccgaggagatcgcgttcgagaatggctggatcgaccgtgagcagctgatgaaggctgccgagaagtacggcaagagcccgtacggcaagcatcttaaggatgttgccgacaacaaaatcatcgtcaagtcgaagcacgactgaaccgttgaatggtttgatacttctatagggattggttaattgaaagtcaacgaactttttacaaggaaaaattggctgttacttaaggcgatggtcagtacggatttcaagctgcgatatcagcagtctattttgggttacctgtggtctgtgctgaagccgcttatgctgttcgccataatgtatctggtttttgtgcggttccttcgcttcggcgctgatgttccgcatttcgcagttgctcttctgctgggtagcgttatgtggaatttcctcgcggaagccacgaacggcggtatgacttcagttgtgggtcatggtgatctgcttagaaagattcatttccccaagatcacggttaccattgcctcgattatgagtgcgctgatcaattttgggatcaacctcatcgtgatgatttttttcatccttatcaatggtgtgcatatttcgtttaaagcggtcttgattatccctatttttgcggagcttctgctcattgcatcaggtcttgcatttttcctgggcgcattgttcgtgaacttccgtgatttgagccctatttgggaagtcgttctgcaagctggtttctacgctacgcccatcatttaccctatttctttggtggccaccaatattggtcctcaagcagctcgtttcattctgcttaatcctatggcacagataattcaggacgcccggtatgtgcttattgcgcccgagaatcagacggtatggcaatcgttcagtacgtcattggtcggtttgattccggtcgctctgtccgttgtcatttttataggtggactggtgtttttcgagtctcgttctaagttgttcgcggagctggtgtaatgaaggaagatatgcagcaaacttcggatattgcgctcaaggttacgaacgtctctaaaagcttcaagcttcctacggagaaatcgagcagcttgaagaactctttgttcaatcttattcgtggtgttcacgggtatacgattcaggaagttctgaaggacatctcctttgaagtgcacaagggcgatttctttggcattgtcgggcagaatggttctggaaaatcgacgttgctgaaaattatttcgcaaatctatacgccgaataccggtagcgttcaggttgaaggcaagcttgtccccttcattgagcttggcgttggtttcaaccctgagctgactggcagagagaatgtgtatctgaatggcgcaatgctgggcttctccaaagacgaaattgacgccatgtatgacgatatcgtcgattttgccgagctgggcgatttcatggagcagaagctcaagaactactccagtggtatgcaggtgaggcttgccttttccgtcgcgattaagtctcagggagacattcttgttcttgatgaggttcttgccgttggcgatgaggctttccagaagaagtgtcaggactttttctttgacgcgaagcgtgagaagaagacaattattcttgtcactcattccatgaatgatgttcgtaagtattgcaataaggcaatgctgattgaaaatgggcatattaccaagttcggtaagcctgatgaagtggccaatgcgtattcgaacatcttcctacgcaggcaacaggctgaggttgctgctgaaaataatgagaagaagttgagcactagcgctgcgtgtgagttgaaggacattaaggttgtcgtttccgacgaggaacgtcagctactcgatatcaacgaggacttcgttgtcgaagcaacacttgaatgcaagcgtgatttgcagggaggcgttttcgcgatcaatctcatagatcaggagggacgcgtttccgttgccgcttcaacacgttcctgcaagggtgagggtatcttcgcaaagggaactcatcgcattcgcttcaacataggaaatacgttgccgtatggcagtttccatatcaatattgcggttgcagaaggatatgatcttgtcctgaggcaggaaaacgtatacaacttcggcattaaaaaggataaggaatataaccaagtattgatgcatccccatattgatgtgtccgttctttgactatattcggtggggcattagacttaaatcatgcgtgatggatcacgagtcttgataactcagagtgctttttccggcattggaggcagtgaggtgcaagcttttgagcttgcacaatacctgcgaaagcagggttgccaagtcacattgttcgcttggatgtgtggctctccaatgtcggatattctgcaggagaatgggttccgtgtcctcactcccgagtcggaggaatcgtctgcgctctcgctgagcgatttcgatatcatatgggttcagcatgagacgttacctgtgcagttgctgaaggaattcgtggataatacggcgaagtccgaccctcttatgattttctcacacttgtcgccgtaccgggaagtgtacattgagcatccgtatactttcgatcttgaagctaagctggctgatgtcatcgtctttaatgctccgaatacacgtgatgcgcagaaatcggagtttcgttcctacgagcggatgatgctttatccgaatcctgcgccgcttgattttgtcgcatcaaagcatatgcaatcaagcgagatgcataagatactagtggtctccaaccatccgccgaaggaattacaggaggcgatgagccttctttccgctaggggatatcaagtggacatgctcatcgatgcgataggcagcgagaagccggccatcacctctgcggagttgttggatcactatgattgtgtgatttcgataggcaagacggtgcaatactgccttgtacagggcatacctgtgttcttgtacgatcgttttggcggtccgggatacttgaacgagagcaactatgaacttgccgagtattacaatttctcggggcgttccaagccggacggctattctcttcatgaagccatgaggaatgctgtatctaatagacggacgccggaagaattggtgtcggacattgaggatggctattcagcggctgtggagtttcaaacctctcatagaaacgattttgttgcttgctactccatcagcaacgcttttgaggccgtctatgagaaaggcattgctgaaaagcataggaaaacgattagcgaccggatatacggagaatatctcgtagaatctcagaaaatgattggcgaatatgtagctgcgcatcgtagacttgccaatcccaatgccgccttctacgagcagacggtacagtctttcgctggtgaaggatatgtttttgctgcaagcgatgtactggagcaagaacaacggttgaagaagaacaactctgttgagatacatgtgccacatggcaagaggacggctcgtgtggatttcggagagtctccctgcgtcatcactgatttgaaggtcaatgggattgaacgccattgttggaataacgcttctttggagatgaacgggacatacttcttcctggatccggacccgcaaatcgttattgatttgggggattccgtgaacactcggaagagtgacacttcgctgtttgtttccgcgaacgtgtaccctctgagtggaatacctcgcgatgtggaagagcatcgcatagcggacataaatgatttgaccgagaacctggagaagattcaaggcagtcgttggtggaagctgcatgagaagatgaagcctgttatatcctttgcgcgaaggatgggacagattgtgaaaaggtttgtacgctagtatgttgtgcacagtgaatggaatgagtaaatgactcttgtagacaattcgacggccaagcggctgggcatactctgtttctacgataagaacggtcgtgcggcgaagttcctcgatggcttccttgaggatctgatgcggagcctgaccgatctcgtcgtcatcgtgaatggcaagattgatgatgaggcccgcaagatgttcggcaaatacacggacatcatcatggttcgtgagaacacggggcttgatgtcgccgcgtacaagcaggcgctgctgaccatcggctgggagaagctggaaacctacgatgaagtgctgtgcctgaacgacaccatcatgggccctgtttacccgttcaaggagatgttcgaaaccatgtcccgcaaggatgtggatttctggggcatcacggcgtacgcgggcgaaaccgtgaacgatgagaagatccccacgcatctgcaggcctactggcatgcataccgccgcagcttggtctcctcgcaggcgttccacgagtactgggagaacatgcccctgtggaaggactacgcggaagtcacacgcaagcatgagatgaccttcaccaagcatttcgcccagcttggcttcaaatgggcgtcctacatcgattggcgcaagtacaagggctactcgtcttacccgctgctgtacatgccgatgcaaatgctgcgcgacgaccgttgcccggtgttcaagcgtcgttccttcttcgttgactacagtgcctacttcgatcagaccgcaggccagccagcgctggatctgtacgatttcctgaaggacgagacagattacgacgtcgacctgatctgggacgcgattctgccgaactacaatatcgacgacattcgcaaagccctgcacctcgactatgtgctgccgaccgtgacccgcaatccgagaaccggagccgacgtgcgttccgcgttcatctaccacatctacttccttgacctgctgggtgacacctgccgttacatcagcgctctgccggaagagaccgacctgtacatcacgaccaccgaagacaagatcgacgcgatccgcgattatatggcctcccacggcgtgaaccatccggtcacgttcatctccgtggtgaaccgtggccgtgacgtgtccgcgctgctggtcgcggcatgcgatgtcgtgctgagtggcaaatacgatgtcatcggtttcgcgcacgacaagaagtcgagccagaatcaggagaacggccatcacggtaccgaaagtcaaggcttcgcgtacaagctgatggagaacacgcttgccagccgcgactatgtggagaacattctcacgctgttctccaatgaaccgcgtctgggtcaggtcgccccgccgccgcccttccatgccctgtactttgcgcacaccctgccgcatgactggggcgcgaacttcgagatcacgaaggaactgctggaagatcgcttcgatatccatgtgccgctgagcccgggcaagccttcggcatccgccatcggctcctgctattggttccgcgtggatgcgttgaagcccttgttcgagtatggctggaagtatgaggatttcctgccggaaggacagatgggggaggatggtaccgtgtcccacgctatcgaacgcgccaacggctacatctgccagtcgcaggggtactatcccgcatgggtcatgtcggatcgatacgcacgtattgaagttgattcgctggtttattccactgccatgctgatgggagcaagttctcgtgcgcatgagggcgaatcgttgcagacaaatatgcacggcttatataaggcgacaaatccaatgaggatcttcccggcagtgaggcgtcacctccataagggtctgcagttcttgacggcgaaaaccattaagaaaatgcctgaaccggtgcagaatgttacttatcgcgcggcttggttacccatcaatgctgtgcgtggggtgaagaacgccgcgttgaatgtggtacgtgccgttcgttggcatagataacgtattttatactgctgtttatggaggtgtcggcggctaatgtagccgccgacacctccataaacagcagtatctgctatgctatgtttttgactttacgatcgtatatacccttctcaaacaggcggattttttgtagtgccgcgcattgtagacgttgatacgtagtcagacgttcaagaagctcggctttctttttcagatctgcctcgtactgaatccggttgctagactcgttgatatctggtgcagttgcttcctcattgacggaaccgatcagcgtgtagtagctacgcgccggcatcacaccgtgttcaagcgcatattcgaaatttgtgattccagccgccacgttgtcatggtagaagctgaaactacgttccttgtgtgttacagagcctgcagattgcagccaataatacaacacgcaatcaatatcggctactttgttcatacgcgcgtacagtcggcctgcgaccatcacatcctgcgcatacatcccctctgggaaccgaatgccatcccacaactcacgtttgtacagacgacaccagttcgcttcgttaaaatatcgtgcttctgtattatgtccggtatattctcctattaatcggagagttttgctgaataccgtttgataagcaagcaacggactgttgaaaacacttatcatttttggtgcgacagtaccttgcagagcttgatgcgagatattttctaattgggaaacgccaaattgctgccaccttgctttgctcatatctgcaccagtgatttgtaaagcatgcagtaagtattcgatgttatgcctgtcgagtatatcgtcattatccgcgaaagcgatatagtccccgtgagcgatatccaaaccggtattttgcgctttggcaattccgccattttcttggtggattactttgattcgtgaatcgctagctgcgtaggaatcgcagatacttgatgatgcatctttggagccatcatcaatgagaattatttcaagatttctgaatgattgggcaagaatggattcaatacagcgtgataaatatttttccgagttgtagacgggaacgatgatggaaataagtggttctatattgggcatagtttctccggaccaaaagtacatgtatcggaatttaagcgttatccacctgtgatgctatcacgtctatcaaatagggaagcttttacccgttgtctaaatgaaagtgcaacaccccgttagattggagattgtctagaaaaccagtccggaagggatgttgcacctatgggggaagtgtattcgcacctgtcggaagaggaacgccaggtcatccagatcgagatcggcaacgggaccggcatacgggcgatcggcgcgatgatcgggcgcagcccgtccaccgtcagccgtgagatcaagcgcaacacgtggttcccgtccaacgagagcgaatcctaccgtccctatcggcccaggcggcggcgcaagcatgcgggccgtcgggtgtcgaggttccctatccccggaagggtctccatcgccgagcgtccgccggaggcggacgaccgcagcgggttcggccattgggaggccgacagcgtcatcggcatgggatgcgacctgcacaccgaggtcgaaaggaggacccgcttcctcatggcccgtgttatccccgacaagaccgccgagcggagcgtcggggcgcggctggcgatgttcgccccgctgccggcggccgccaggctcagcgtcacgcacgacaacggcaccgggttcgcccgccacgcgcggctgcgcgacgaactgggcatggccacgtgcttcgccgacccctattccagctggcagcggggcggcaacgagaaccgcaacggcatgatccgccgttacctgcccaaacgcacgatcatcgaaccgggcatggcgagggaactccaggagatcgtcgacgagaccgacaaccggcccatgcgagcgctcggctaccgcacacccgccgaggcgtttgccgacgaactgccagacttacaactctgacgaaggcgttgcacttacaaatagacaacggggttgggcgtcattcgctggtagtgcaccaaaaagcgctgtctgcatgaagccttctacagcagtcccgccatgtagatcggcagtttgaccacgtcattttccacaaccagcggtttcggatgcagcacgtatctggtgccgaccttcttatcgaattttgccttgaatttgtctaacgagaccgtgcggtagcgtttcgatgacttgacctcgatggggctgaccctgtacttcattgccgcgttctcgtacggttcgacgatgaggaagtcgatctccatgcggttcgacgggtcgtcgcgatcgctgcgcgaatagaagaacagccggtgcccgttgacccggagaagctgtgcaacgacgttctccgcgagcatgccctcgttgatctcgatgcgttctaggaggatgtcccggtacaggttgcttccggtctgttccgagtcggccagggcgagcgtagtgagaagccctgtatcggcggcgtagcatttgaccgtcgaatggtcctcgctaatgctcaagcccacgctcggatcggtggaattgaaacagtcgttggtaatgaacgcatcggaaagccagaagaaggcgtcctcgtaatcgcgggttttcgctttctctcccagcgatgtgatgttgaacttcttctccttcttggaaagctgacccaccaggttgtcgaagatgcgcgtgatgcgtatccggtcgctgccgccatgcttggagatgtcctgcctgtacagtcggaggatgttccgtttgacgttgtcgactttgctgaaatcatgggtctcgacgtacttcgacacagcctggggcatgcctccgaccagcatgtattcacggaatagccgcatggctttcctgtgcagcgaatcggggagcggcctgcgcttcttgaacgagtccgcgatgagcgtggacagtggcttttctcccaaagcccagaggaattcatcgaaatccatgggattcaggcggatcgactcctcctctgatggaatgaggatgtccttgacgttctcgcggatggagacgagcgagcctgtctcgatgtagtcgtaacgcccgtcagccaccagctgcttgatggcctcgcgggccttcgggtacagctgcacctcgtcgaaaatgatgaggctatccctcctgtgcagttccactccgtagaaggatgacaggtacatgaagaacgcgtcgaggtcgttgcgcaggtcgacgaagtagcccagcacgtcatcgggggctttcgagaaatcgacgagcatatacgacgcatagttccgtcgtccgaattcctccgcgatggtgcttttcccgacgcgccgtgcgccctcgatgagcagggctgtgcttccttgggaagaatccttccaggaagccagttcttcgtacgcttttcgttcgaaagtttccatgtctcaccgccgtagatacaccaaatcaagggtaataacatgcttaattatacaccaaatcaaggctaggcgaagtgctatttatacaccaaatcaaggataactaaggtgttgtagatacaccaaatcaagggtaatgtaatggtggtttgctgatcggcttgaattagatttctgacaggtggtcttatatatggcagattctggcgttcgtccggacgtatttcgcttatatgtggcagctcatttttgtgacagaccggttagggggtaattgtgtaccctctaactgcggtctttctggaatgaactgccatacataggcgagatgcctccggtcagccttctgaatctgccatctataagccagtttgtggaatcgctttatggctatgcaaccctgcgatgcgattgaatatccgcggcaaggcaggacgaagaagaccggtaagacgccgagttcaagttcaacatctcgaagtaagtgtttctctggctcccctctttgaggggagctgtcgctacaagcgactgaggagcggcacggataaggcctgagaagtcgtcttctcgggcctttgtcatgacattgttctgcaaggactggctgctgcagcagcataatgtgtgttttattattcggccttggcggcttgctggtcaatccaattgttgacgtcggtgaccgcctcgtcaagggttgctttggcggctttgtagtatttggaatctacaggttgacgatttccgctccgaatggccagagcgcaagcttggccatcttgaacgactggaggccgaacgggatgccgatgatggtgatgcacagaatcagtcccaccactgcccatccgattgcgatggccaacccaccaagaatgatccacaggatattgccgagaactcgcgtgatttgcccctttccgattccggtcgatgcctcgcatgtccggcttcactattttgccagacatcatgacggaaacacgagacgcaacccttggctcgcccctgattcatcctcgggccgctacccaggcggatcgtatgcggtaagcccaatccttttgtaaagattttgtgtattgtcgggcatgcgtgggtttcaccgtcgatctgaatgatgataggcttctcgatgtctgccgtacgaagacccatcaaggagatgccatgaacctgtatcgctacgcgatgttcatcgcacacgcctgccgtgggtcgttcgtcggcaatgttctgtttgccaatccacaaatggccctattctcgatgctggtgtagcggggacacgccttatgccgggatgtaccgatggcccatccgcagtcgacgtcgcatgaatcgctcaccatagccatcaacttacgcaaagccgcgaatcgtttgccgtatatgaatgcggaacggatggcggcttttcctttaccccggactcatcggtgtccccgcgtcttgacacaagtatggggccggatcgcccacacatgccgttaccaacagaaggaaatgctgtgacctcacagaaaaccgcggaatccgggtccgccgccagttccgtaaagcctattgattcgcacgcccgattcatcgtcgtgggcgtgatcgtcgtcggctcgttcatcgcgctgctcaaccagaccgtcatgtcaccggccttgccggcactgatgcgtgatttcaatatcaccaccggcaccgtgcagtgggtgaccagcgtctacatgctggtctcgggcatcatggtgccgatttcaggctatctgattgataaattctccacccgaaagctcttcgccggagcccttgccactttcatggtcggcacactgctgtgtgccgttgcgccgaatttcgtgctgttgctcatcggacgcatattgcaatccgccggctccggcgtgctgttgccattggtcgccgtagtgccgatgctcgtctatccgccggataagcgcggcaccgccatgggcatggccggtatcgtcatggccgccggcccggctatcggcccggttgtcggtggtctggtgattgacggtttcggatggcgcctgatgttcattggcattgcagtcgtggcactggtcatccttgtcggaggcacgatgatgctcaagaacgtcagcgagttgaagaacccaaagctcaatgtcctgtccgtgatcctttcgaccatcgcgttcggtggcctgctctatggcttctcgtccgcttccacgatgggatgggccagtccggtcgtcattacctcaatcgtcgttggtcttgtggccttcgtcgcattcgtatacaagcaagtcaagctcgatgagccattgttgcgcgttgacacccttgccacccgcaacttccgcaactccgcgattctggtcactctgatcaacgccgcagtcgccgcaaccaacgtgacgttgcctatcttcatccagaatgtgctcggccaatccgccaccgtcaccggcatggtcatgctgcccgccgcggcggtcggcatcatcctgagtccggtcgccggtgccgcattcgacaaattcggcccgcgcggcgtgggcattggcggccttgcgctcatgaccatctctcttggtctcctcggcaccatcaacaccaagacatcagtgctgtttgtcgccgtgttctgcgcattgcaggcatctggtcaggctatcgccaacatgccgatcaacacttggggcgtcaacgctttgccgaacgacatgatcgcccatggcaacgctatcgccaacaccggccgccagatcgcggcagccattgcgacctcgcttctggtcaccgcagaaacatccgtgaccgcctcgcacatgtcccagggtgtgaagtccgccacggccagcggcattgcgttctcctacctgctgtgcgccgccatctcgctggtcgccctgatcatctgcatcttcaccgtcaccagccgtgccaaggagaaggccgcacgcaacgccaaggcctacgaggcgcaagcctccgccgaagtcgcggccgaaaccactgaaggccagcccgccgagcatcactacgccggcgcatacgtggcccccgcctcctccctgttcaagcaggcccaggaacagtccatcggcgggatcatggacgatcagccctacagctgcttggacagcgatgacatcacgcatgtggtgcgcgagttcatccgcctcaacgtttccagccttcccgtggtgaacggcgatggcaggctcgtcggcttcgtcagcgacggcgatgtcatgaaatcgattgccacctatgaatcccgtacggtttccaccggcaccggttcgacgatggtggtgttcgacgacgaaaccgtggcctccaaggtgcaggcgctctccggcaagaaggtgatggacatcgccacgcgtaaggtcgttgccgccacgcccgaccagcatgttggagaggtggcccgaatcctcgccaagaagcagttcaagaaactgccggtggtggatggtgatggcagactcgtcggtgtgatccgccgtaagtccgtgatggaacatgccttcgacgcgctgttcccagaggatgatcggtgattcggcgtcatcatcgctgaatagaatgaatggaatatgaggcttcccttctcacgggggaagcctcattgctttgtccgcggagtcttacggcacctgcgcaagggcaacgtcacgctttcatgatgcactattgaatagtgtgttcctatcgttgcgtggtgacgctaacgcatggcgtcacgatactgaagcctgccatctaacggcgggtacggctcgttgctggagtcgtgcacgcatacgcgcgtcggcgtgcgtatgccgtgatgtgacctttgtagtggaattgaagagttgagggacttctgctgttttcgtgggttaggttcttggttgtggtaggtgtatgtcgagtccgtcgcagcggagcatgacgagcgcgatgaggctgcctgaagtggcctgatttctgttccccttttattgtgagacggcttgtgccgcttggtttgcatgatactcggtttcgatctgttccggtgtcctgcagcccagcgactggtggagacgcttcgagttccaccacgagacccaccggaacgtcgccaattctggctcggccaggtcggcgaatggcttgcgccgccacaccagctcggtcttgtatgtgtcgttgacgctttcggccatggcgttgtcgtacgagtcgccgaccgtgccggtcgagggaagcatgccgtgttccctgacctgggtggtgtacaccgtgctgatgtgtgttttgccaaattgaagtagtccagaatggcgtgtcaattcaatctcgtactctacgggcccgtcgacaccggcaagacgcatctcgcggtcgcgttgggcaggctcgcgtgcatgcgcgcgataccggtcgggttcttcaccgcgaccgggctgctcatgcggctgcgccgcgcgaaacgggggcggctcgacgcggagctccggcagatcgccagggcgaggctcccggtcatcgacgagttcggctacatgccgatcgaccgcaccgtgcgccacggaaggctcaccggatttcgagggaggctcctaccgtagcgagcacgccctcatgaccagatagccaggaagaaaagggcggcgggttccgacggcgcagtttctgctggaaaccagccgcctacgctgctgaaaaatagtgcccatactgtggacaccaacttgcagaaacacacaacttgaccaccgagaagcgcgccgaccgccagtacgacgtggagttccgcgacgtctcgttccgctacccaaacgcgctcgaggacgcgtggggcgttgcggcacgtcaacctgaagttcaaagtcggctcacgtcttgcggtagtgggcatgaacggcagcggcaagaccacgttcatcaatctgctgtgccggctctacgacccgatcgaagggcaaatcctgctcaacggcatcgacatccgcaaataccgctacgacgaatacatgcgcatcttcgccgtggtgttccaggactttcggctgttcgccctgccgctcggccagaacgtggcggccggtgcgcactacggcagtgagcgcgtgatggactgcctgagtaaggccgacttcggcgaccggttgaagacgctgccggacggacttgacacgcccctgtacaaggagctcgacaagaacggcgtggaagtctcgggcggcgaggctcagaagatcgacatcgccggcgacaagacggccgtgtatatcagccaccggttgtcgtcgtgcaagttctgcgacgacatcgccgtgttcgaccatggcgcgatcgtccagtatggcacgcgcgaccagctcgtggccgacgaaaacggcaagtactacgagttgtggcatgcgcaggcgcagtattacgtcaaggagtaggcgccgcgggtggcagatgcattgtcgtgcgtcgtcatgggcggcagcccgacggtgccgcccatgccggaaggccggtaagtacgggcgcccgcgaccggtcagagcggcagcaggtcgctcaggtcgtcgcgctcgccgacggcggtgatgcgccccgcgtccttctcttgggaccatgtggtgatgccggcggcgagacggagccacacctcggggtcgagctcgatgacatcgggcggtgtgagattgtgcgggtcggacgccgggccatccaggatcttcacggctccccatggtgcgactcgcacttccacgccggggccgggcgccttgcgctccagcagatataaggtgtatcgcaccgccatcgcccatgtcggtcggggcagcgccggcatcagggactccgagtccgccccgtcctcgcgcagtcgctgcgctgcgtcgttccactgctgccacgcgcgctcgcccgcgggtatgtctcgttctcgaattgcggccatgactccattgtgcctctaggggtgacgattgccttttcgcatcggccggcggttctcggtgcggtttcggatgctttgcgtttttgcaaaagtgtttcatcgggcttgcatcaggtgttgcaatacgttgttttccaacgtggcaacgttttctgtcgtctcaaaatgtggttgatatatagccgatttggtgtatttatggcaaatcctgtatgatatttcatgtttctgcaaacgattgcataacgttacgcagcgttcaccggaacttattggcgtggtcaccaagccgtcgcataataacacaggaagcataatccggaaagagagtcagacatgactgaaatcactgcacccaagtcgcctgtcacgaccgccgagttcgcggacggcatccgcgaacagctgaagtacagccaaggcgtcaccgtcgagcaggccacccccgccgacgtgtacgtcgcctcctcgctggtggtccgccactacctgcaggacgcatggttcaagacccagcaggacatggtcaatggcaacaccaaggccgtcggatacctgtccgccgagttcctcatgggcaagcagctgcgtaacgcactgctcaacgtcggcatgatcgaccagttcgacgaagccgtcaaggacctgggcttcgagccgcaggacgtcattgacgtcgaacacgagccgggcctcggcaacggcggcctcggccgtctcgccgcctgcttcatcgactcgctcgcatccctcggcgtacccgcgttcggctacggcatccagtacaagtacggcatcttcgagcaggccttcgacaaggacggcaagcagatcgagaagcctgactactggctgaccaacgaagagccctggggccacatcgactacaaccgttcccagaaggtctccttcggcggcgaagtcgtcgaagagaacggcaagaaggtctggaagccggcctggtccgtgcgcgccgtgcccgtcgactacatggtccccggctacgcatccggccgcgtcaacacgctgcgcctgtggagcgccaagagctacgacgaattcgacctgctcaccttcaacaagtccgaatacctcgacgccgtcaagccgcaggtcaaggccgagaacatctccaagattctctacccggaggattccaccccgcagggcaaggcgctgcgtctcgaacagcagtacttcttcgtggccgcgtccctgcacgacgccatccgcgtgttctaccccggccagagcaagcccgacctgaccaccttcccgagcaagatcaccttccagctcaacgacacccaccccgtcatcggcatccccgagctcatgcgcatcctcatcgacgagtacggctacgactgggacaccgcctggtccatcaccaccaagaccttcaactacacctgccacaccctgctgcccgaggcgctggaagtctggccggccaagctgatctccgaactgctgcctcgccacatggaaatcatcaacgagatcaacgagcacttccttgccgaactcaagaccaagacccgtgacaaggccaagatcgagcgcatgcgcatcgtcaccgacgaggagaaccccaaggtccgcatggcatacctcgccaccgccggtggctcccacgtcaacggcgtcgccgaactgcactccgaactgctcaaggacgtcacccttcgtgacttctccgacctctacggcgacaagttcaccaacgtcaccaacggcgtcaccccccgtcgcttcattcgcctcgccaacccgcgcctgtccgccctcatcaccgaaggcctcggcaccgacaagtggctgagcgacctcgaactgctcaagggcctcgaacccctcgccaaggacgacgaattcgtcaagaagttcgccgccgtcaagcaggccaacaaggaggacttcaccgcctacgccaagcgcgaatacggtttcgacctcgaccccaacaccatgttcaacaccatggtcaagcgcctgcacgagtacaagcgccagtccctcaagatcctcgcgttgatcgccaagtacgccgacatcaagtccggccgcgtctccgccgacgacgtgcttccccgcaccgtcatcttcggcgccaagtccgccccgggctactacctcgccaagatgaccatccagctcatcaacaacgtcgcccgcgtcgtcaacaacgaccccgacgtcaagggcaagctgcacgtcttcttcccttggaactacaacgtccgcctcgcccagcacctcatcccagccaccgacctcgacgagcaaatctcccaggccggcaaggaggcgtccggcaccggcaacatgaagttcgccctcaacggcgccctcaccgtcggtacgttggacggtgcgaacgtcgaaatccgtgagcgtgtcggcgccgagaacttcttcctcttcggcatgaccgtcgacgaggtcgacaagctctacgaagatggctactcgccggccaagtactacgaggccgacccccgcctgaaggccgccatcgacatggtctccgacggcaccttctccaacggtgaccgcaacacctacgcccccctcgtcgccgactggctcaccaaggactggttcatgaccctcgcggacttcaccgcctactccagcatccaaagtgagatcgaagccctctaccgcgaccccctcgagtggaaccgcaaggccgtcctcaacgtcgtgaactcgggctacttcagctccgacaggtcgatccaggattatctcgacaacatctggcacacctccccgttggcctgattgcggagcgtcctcgtcgttgctcctcagtcgcggtacctttgtaccgtttccttcggtgcgcctagaggacgcacacgtaatcagtccgccgggctgcgcccgcttgccgactgacggcgtgtaacgtgattcgcccccgctggcgggggcgaattttgttttacatcactgcgcagcgcggcgaatggcgaacacggcgactgcggcgattagcagcaggaagccgcttgcaagcatcgccatcaccgggcttgctcggcgtggtcggctgctggtcaccattcgacgcgatcgcgaccgcgaacgacgcggatacgcctgagtctcgatgttcaacgatccgggaagatcgtaatccaaggtcttcgcctcatcgaacgtccagctcacccaaggctcgggcttcacactgcccttggactgccagtcgccccacgcggtgtcggtattgccatcgcataggttcggaaccggcgtcttgccttgcgaatacgacgcttcgagcttgccggcaccgcatacgttgctgccgtttttcgatcgtggcggcggtggggcatgtctcgacgaagaggggcaaagttggaatcgccatgcagtgagccatccagagcctcaatgcggcacaatatgcgaaaagagcctgtctgcgaaatgcaggcaggctcttttcgcggacacatgtgtgcctacaacgattgactgttaaatgaactcaggcggcttccggggctgcttcggcctcatcggcgtcgcccttgtcggcgtctttggtcaggccaaggtcgaccggggacgagctgttctcccaaggctcctcccacggatcataatccgggttctgctgcttgtagatgtacagaccaaccacggcggccagcagcgcaccaaagaacaacgcaaagaacttccaaccgtttgaagacttgttctccatgacggctcctttcccaatcctggttggcttgcccgttcaaaaccaactctgggttccatcttaattccaaaaatgtggcgattgcgtgcgggaatgcttttgctttgccggcggtgcgcacgacgagccgggagcgtgttgtttcaccgtccggcgaggagatgcgattccgctacagtagatgacatgagtaatggccgattcagtttgtttcccggtgcgccgtcggcgcacaacctgttctccaagcgtgcgattcaatatcagtggcggtcgaacggccctgtgttcaccagcgcgatcatcatcgcgtgcgtcgccgtgtgggttgtcgagatggtgttcagcctgttctggcctcttggactcgcaaccatgatctattacggccggttcgacccgctgacggcggtcgcacaaccgtggatgttcctcacgtcgatgtttctgcattcgccgaagtcggtgctgcatatcctgttcaacatgctggcgttgtggagcgtggggccggtgctggagaagatgatggggcattggccgtttctcgcgctgtacgtgctttccggtttgggcggcggtcttgggctgatgtcctgggccgcgctgtggccgggtggcaccgggtggcttggtggtgcctatggcgcgtccggcgcgttgttcggcctgttcgcggcgatgctagttgtgtaccggcgcatcggagaggatatccgttcgatgctggtctggatggcggtcaacttcctgatgccgttcctggtgggcggtatcgcatggcaggctcatgtaggcggattcatcgtcggcggcgtgttcacgtggctgctggtttccggcgtgcacgcgttgcgtggcaagagcctgacgttccggacgatggtgtacggggcggtggtgttggcgctgatcgtcgcaggcgtgctggtctgtaatctgagcaatccagctctgacgtacatcatgtgattggcctcttacccggtgaaagtcccacccggtgcggcgtgttcgagaacagcaggcgccttacgggtacaggcgcgtccacctggaattgaggggcgtgggcgtcgtcgtgtccgccaaacgggtcatgcgcctgatggcccggcacgggctcgtgcccgtgtccaggagcgcgaggcgctactcctcgtacaggggtgagatcggcgaggcgcccgtcatccactcggaccgcggctgccactaccagtggccggaatggatacgcatctgcaagggccacgggctgatccgctcgatgagcgcgaagggctgcagcccggacaacgcggccgcggaggggttcttcggccgtctcaagcaggagttcttccacaagcgcgacttcacgggcgtcatggtcgacgggttcgccgacgatgctcgacgagtacatgacatggtaccgcgacgaacgcatcaagaccgagtacgggatgagcatcatggacaggcgcatcaagctggggctcgtcggctgaacacatgtgataacctgccagacaaccatacagacaacgaagtccaacaaaacgtcaccgcccccgagcttgtgatgggacttttgtggggtgggcggggcactggagaatggctcagggtgaaggcgtcgcaccaatgtgaattacatgcgtgtagttttccacatgatgtggagaactttgtggacaacttgggtataagttgggtataactcgtggataactatggtgaataagtccgtgtgagctctaacaatgttggaaataatgggttttgacacattgtggacaatgtgcacaatgcgaataagagttatccacaattgtgtataagtatgtgaataatgtggataacatggggaaaaccggtggatagatagtgcacaacttgatttgcggagcatccgttacgggtctcgaagccggggcgcgatgacgctgccgggataccatgacactatggatatttcgtctcagaccagtcggttcattgcggcgcaccgcaatcaggatgtgcgcgacctggcgctcagcgccaaacgcgtggacgggcttgacctgccattcgcgctcgaccagatcgccggctggcagactgcgtgccgcaagctgccgcaatgggccgagaccgacggcatcgtctatccgccgcacatctccatggaacagtgctcttcccagttcgccgcgcagtacaaggccggcatcgcaaggcgcgtagcgggcgccggcggtgcgatggtcgacctgaccggcggattcggcgtcgattgctcgtatatcgcgcgtggattcagccgggcggtctatgtggagcgccagcctcacctgtgcgagctcgcggctcataatttccgggcgctgggactcccgcacatggatgtgatcaacggcgatgcggaggattggctgcgcggcgtcgttgacgcccgcgccgcctccgcagactcggccgcagtcgattcagctacagccgttcccatcgcgctgatctacctcgaccccgcgcgacgtgacgcgcatggcggccgaacctatgccatcgccgactgcacgccggacgtactcgcgctgaaagaccgtctgctggccgtctcgccgcacgtcatggtcaagctgtctccgatgctggattggcgaaagacggttgcggacttcaacggttcggtcggcgaagtgcatatcgtctccacaggcaacgaatgcaaggaactgctgctggtgctcgaccgcggttcgcgcgacgccatacgcgtgatctgcgtcaacgatggcgacgtattcggatacgtccatgacatgaagaccggcgcggattctgacggcgtggtcctcgccgccgcaggagaaaaaggcagtcagggcgggtctgcagagccgtcacacgccgctccggaacagcccaggtatctgtacgagccgaacgcttcgctgatgaagggcggctgtttcgcgctgctggaggaccattatggtatgcgccagatcggcccgaacagccacctgctgatatcgggcacgccggcgccgcagtttcccggccggggatttgtcattgaaaccatcgcgggtatgggcaaaaaagagctgaaacgggctctagcgggcgtcgacagggcgaatatcgcagtgcgcaacttcccgttgaccgctgtccagctgcgcaggaaactcaagctggcagacggcggcgatgtgtatctgttcggcacgacgtccgtcgatggccgtcatgtcatcgtccgcaccgtgaagcagtgaaaccgcgaaaagggtatgacagcaacacagtttggcggtggcgcagcaccatgccgcgccaccgccaaaccgtaacgtcgcttaccgtcgatatggagctggctgccgcgaggggatctcgccgctcagcgccaccacatcgtcatgatgaatccgaccataatgatcgcgaaggcgattgccaggttccaagcgccgatacccgggatcggccacgtgccgttcggcgacaggtagtagaccacggcccagatcaggccgatgatcatcagcgcgcagaacagcgggacgaaccagcgcgggttcgacttggtgcccttgatggtctcctcgacgcggcgcgtgttctccgcctgccgcgacatcatgcgctgcatctgcggggtcatctctgacttgtcggcggtggcgttgagcaccgcctgcaccttgtccatggagacgccgtaatcgtcatcggcctcgtcggtctcgttggtgtccgtgtccttgacgtcggcgtcggtctcggcctgccagtccttctggtcttccgagtcggtttcgtgcagctctgtgtcagccataagcgtagtctccattcaataggctaaaaaatcataatagcggttacactcgaaagttgaacacactgggaggaatcatggccagacacaccagcaggcacgccgcccggcgcacgtggctcggcggcttcgcggtgtgcctgatcgtggctttttccgggtatctgctggtgacgaacgtgcgcgtgaaccgcacggcaacggtcacttccgacacggcggacctggtggagcagcgcgtggagcatgtcgaccagctgcagaaggacatcaccgacctgagcgcgcagatcaacacgctgaaggatttcgccaacaacagtggctcctccgagcagccctcgggcacgagcgaccccaagcccagcgacaccgaggacgcgggctccggcaccatactgccggcggtgcacggtcccggcatcaccgtgactctgaacgactccccgttgtgggagaacatggtggacagctcgggctcggccgcgaacatcaacgattacgtcgtgcatcaggaggacgtggaggctgttgtcaacgccctgtgggcgggcggcgcggagtcgatgatgatcatggaccagcgcgtgttgttcaattccgcagtgatctgccaaggaaatgtgcttctattacagggcaagaaatactcgccgccgttcaccgtgtcggcgatcggccccgcagatgccatgattcgggctttggacgactcgaatgcggtcaagttgtataaagagtatgtcagcgcattcggattgggctggaaagtggaaaaaaaggacgatctcgtgttcgggcagtctgcggcgacgctgcagccgttgcggtatgcgtccgtggtcaaggacgggagcgaggaatgaagcattcgcgcaactctcaacagattcaaggcgattttcaggatttcgaggcgcctgcccctgctgaaccggagtacgccggggaagtgaccatggcgctgcctccggtgccgatgcccgatccgaacgcccggcgcggcctcgcgcagccggcggccaagcgcagcgttctgtggtcggtgctggggatcctcggcgaggtgctgatgacgctggcggccgtctgcgcgctgtacgtggtatggcagatgtggtggaccggcgtccagtccgagcacacgcaggtcgagacccgccagtcggcgtcatggtccgatccggccggcggcgacagctcgaaggtcgccaaggcgcaaagcggcgacgtgccggtccagccgacgagcgcaagcgatggcgagctcatcgcgcaggtgtacgtgccccggttcggccaggggtgggtgcgtaacgtggtcgaaggcacggacgaggccgaattgtcgctgcatggtctgggacattatccgtccacgcagatgcccggttcagtcggcaatttcgcggtcgccggccaccgcaacggctatggtcgaccgctgggagacgtcgacctgctgcaggagggcgacgcgatcatcgtgcgtaccaaggactactggtacgtgtacaagtacacgacatacaagatcgtcaccccggagcactccgaggtcatcgccgctaacccggaggatctcaacacgcctcccagcaagcgcatgatcacactgaccacgtgcgagccgaaatacaccacggccacgcatcgttggatcagctacggcgagctgagctattgggctaaggtctcggatggcgtgccgcaggagctcgccacgtcgtcgaactcggcgaaggtggcgttctccagcagcaacacgagccagtcgttcgtgtccaagctgggcacgctgcagcccatcgtgctgtgggcgctggtggcgtacctggtgctgtacatcgcggccctggtggcctggcggtacccggtgctgcgcgagattcgcgccggcaagcgccgccgtccggacgcgagcatctacggatggctgctgcgtcaccagcccggtccgctggtaatcaggtgggcgctgctgatactgctgctgttcatcgtcagcgtggtgctgattcagtgggcgtgcccatgggcggcaagcaacatccccatcctgcaaagcatgtcgaattacgcggtcgattagcggcatggccggttggcggcgataatgggaacgtatgggatggcggtcggcgctcgccggtgccatcccataatcagaacgagacgaggagcgtcatgacggattcggcacgcattgtggtggtggacaattacgattcgttcgtatacaccatcgttggatatctgaaaaccttgggagcgacggtcgatgtggtgcgcaacgacgcaatagacccctcagatgcctctgtgctggacgaatatgacggtgtgcttatttcccccggtccgggcgctccggcggattctggggccagcgaggacgttattcggctatgcgccaagctcggcaagcccatgttcggtgtgtgcctcggcctgcaggcgctcgccgaggtgttcggctgcacggtcagccacgcgcccaccatcatgcacggcaaaaccagtctcgtcgagcatatcgatgatgagatcttcgccggcgtcgccaatccgatgaccgcgacccgatatcattcgctggccgtcgagcccgacaccgtgcctgatgacctggtcgtgacggcgtggacgaaggatgaccatatcgttcagggcatcaagcaccggtcgttgccgatgtatgcggtgcagttccatcctgaatcggtgatgacgcaggacggctaccggctgctcgccaactggctcgccgtctgcgggcagaccaacgccgtggccaagtccatcggtctgcagcccaaggtcaaccgctgacacgcacgtgtgtgtggcgtcgcgcgtgacgcgcatgacaacgatgatggcccgtggcatgaggaatgccacgggccatcatgtgttctgggccgatgtgtgtagaccgcgcggctgggccgcccgtctggccgatcgacccgccgcgattgccggttgcgcttaccggccgtcaggcggccgatcggtcacaccataatggcaatcacggccattcccggcggttcagtccccgcctgtcgtcgtgccgccgttgccgttgttgccgggatcctcggtggtgggcttcttggcggtgactgagatggtgctgcccttgtcgacctgcgtgccggctgcgggatcctgcgtctcgatgaccgcatcatcggtcgcgtcgccggtgaccttcagcgtgaagtcgctgcccagcgtggccttggccccggcgatcgtgttgccgaggagattgggtacgctgacctgcggcttgccggtggacacgtagaccgtgatctgcgagccctgcagcaccagttctccggaaccggggctgactcgcgtcaccgagcccttctccaccttgtccgaggcctcctgctcgacgaccggcaggaacttcatggacgagagcttgtccagcaccgtgtccttgggctggccgaccagaccatccggcaccttggtcatgcccgaggagatgtacagcgtgatcgtcgtgcccttgggctgcgacgtgccggaggccgggtcggtgctcacgaccttgtccttctcgatggtggcgctgtcggcggtcttcgtgacggacgacaccttgaagcccagtttctccagcgcgttgcgcgcatcctcctgggtgtagtcgctcaggtcgggcacggtcaccgacttggggcctacggagaaccagaccttcacgtccgagcccttgacggcctgagtgtcgcccttgggggactgcttggtgaacgtgccggcgggttcaccggaatccgaatcctgcatctccacgaagttgaacccggccgaggtgaccttctccttcgcctgcgccttggtcatcgtcgccgtgatggtgggcacggtgcccatctccgtggcggatttgcggctcatggtgtagatcacgccgaagatgatcgccagcagcaccacgccgctgatgatcgacgcgatgatgatcttcttcttgcgcttctgcctggccgcctccgcgcgttgttcggcgcgagacttgaccgccagggcctcgttcgggttctgcgccggaggcaccatctcgaactggccggtcgccgggttgtacgcctgcgtgggctgacccgcgccgacagcactcatcggcacggtagcgccgccgtcctgctgctccgcggccttgcgggccttcacgttggccagatcggtcaacgggttgaacgccgccgcgaccggcacgccgccgttcatgaacgtcaggatatcgttcttgaattcggccgccgtcgcgtaacggttctgccggtccttcgccatcgccttcgcgcagatcgaatcccacatgcgcggcaggccgggcacgagcgtgctgggcggcgtcgccacctccgacacgtgctgataggcgatcgccacagccgagtcgccggtgaacggcggacggccggtgagcatctcatacagcacgcagccggccgagtacaggtcggagcgcatgtcgacggtctcgccgcgagcctgctcgggcgagaggtactgcgcggtgccgaccacgccttgggactgggtcatcgttgcagcggagtcgtcgagcgcgcgggcgatgccgaagtccatgaccttgaccacgccctgctcggagatcatgatgttgccgggcttgatgtcgcggtggacgatgcccatgtgatgcgagtattcgagcgcgttgagcacgccgagcatcacctgttcggcgtctcgctggctgagcgggccgttcgccttgattacgtcacgcagcgtctggcccttgacgaactccatcaccaggtacggcagccgctccgtgccgccgctgtcggtcatcacggtctcctcgccggagtcgtagatgttgacgatgttcgggttgttcatctgcgccacggagtgcgcttcgcggcggaatcgggacaggaagatcttgtcgttggccaggtcggcgcgcatgatcttgatcgccaccgtacgtcccaggcgcgtgtccaatgccacgcgcacttcggccatgcctccacgccctacaagttggccgagctgatagcggccgttcgccagcgatgccggcatattgctgctcatagctattcctctcgattcttcgggtcggtcgtcgccgtatgcccgccaaattggttacggttcatggtgatcagcgtcgccgtgtgcggtgtgctggatacgcggcggggcatgcgcccgccaagtcccatgatggtctcatccatctgcgcggtctcctgatcgagcagacgtcgttctatgcgcgacagcgtgcgcgaaacggtcagcgcgtccttcggacggtcaagcggatccttggacagcatcgacatgacgaactgccgaagctgcacatctatggaatccggcagcgggggcaccgggtcgttgacgtgtgcggcggcgatgtcgaccggtgtggtgccggtgaacggccgatgcccgcacagcccctcgtacgcgacgacgcccagcgagtagatgtcggattgcggcgtggcctgtttgccttgcgcctgctcgggggagatgtactgcgcggtgccgacgaccatgccatcctgcgtgatctgctcctggttcgtggagtaggagacgccgaaatcggtgattttcacctcgcccgtagtggagaccatgatgttggccggcttgacgtcgcggtggatcacgccgtggctgtgcgccacgaacaggccgcgcgcggtctggatcagtatcggcagcagttccgtcgcgggcagcgtgccacggtcgcggtagatgtcggccagcgagtcgctgggcacgtactccatgatgaggaagccgatgctgtcgtgctcgtaatactcgaacagcgcggcgatgttggggtgcgccagattggcggaattgtgcgcttccgcccgcagacggtgcagcttggcctcgacgttgccctgatcgtcgcgcagcgccttgatggcgacgggacggttgagctggatgtcgtggcctttccacacctctcccatgccgccttgcgccagtcggcgatccaggcggtaacggcggtggatgagttgtccttcgacgagtttcattgtttcagggcctcctccatcagtgaacgcatgatcggtccggcggcttccacaccgtactgattgacattatggataacaacggagaccgcgatcttcgggttgtcggcgggggcgaacccgataacccatgcgtcgttggtctggttggagctgccgatctgcgcggttccggtcttcgccgcgaccttgatgccgctcagctgcaggctgggcgcgtcatgctcgaccaccgactgcatcatctggttgagcttggacgccgtgctggagctgaacgcggtggacatcacttcgggcgtggcttcggacagcgtactcaggtcgctggcccgcacgcggtccaccagcgtcggcctcatgagcttgccgtcgttcgcgatggccgcggcgaccatcgcgttctgcaatggcgtggacagcacgtcgccctggccgatggacgccagcgccaccttgtcgtcggacagcgtgtcggggaacttggcggcgacggacttcatcgggcgcccggacgacgaggtgccgtcgatggtgatcgagcttccgtagccgagcttcttcgcctgctcggcgatcttgtcctggccgagtttcacgccgagctgggcgaacgcggtgttggacgagtatgtcagcgcgttctgcagcgtgatcttgccgtcgatgccgttcgccgcggtggtggtgttggtcaggttcgtcgaggttccgggcagcgtatagctcgctccggcgggaatctgagtatcggtgtcgtagtcgccggattccagcgccgtcgcggcgacgatggtcttgaacgtggatccgggcgggtacagctgcgaggtcgcacggttgatcatcgggctgttggcctgcgcggcgagtttcgaatagttcgcggtggctttcttcgtgtcgtgcgtggcgagagcgttcggatcgtagctgggggcgctcgccagggtcaggatgcggccggtcttgacctcgatgaccactgcggcgccgtcgttgctgccgagttgctggtaggcgagctgctgcagcttgggattgatggacgtctcgatggacgcgcccttgttctcgacgccggtgaacagcgatttcagctgatcccagaacagcgcgtccgccttgccgctcagcagcttgttgcgggatgattcgatgccgcggtcgccgcgctgggtgaccgagaagaagccggtcaccggggcgtacaccggcccgttcgtgtaggaacgctggtatgagaacacgtcgttgaccggggtcgactgcgcgaggatcgtcccgtcggacgcgagtatggcgcctcggggagcgccgtattcctgatacagcgcccttgcgttgcgcgggtcggagctcagcgagttggcgcggatggcggtgatgatcgtggtggacatgccgagtaccacgaacaaggcgatgacggcggtgaacagctgcctgaggtatttgttcatcgcgcacctgcctcgatgatttccgtggtctggttgttcgccgccgcgtggcggggttccggtggccgctcggcctgcggttcgcgttcgggtgcggactccttgtcagtgcgttccttcagctcgcggtcacgcagcaccgccagcgcctcgtattggaacgtgtcggacagtgtgtccggctccgggcggttcgccgcgttcgagatgatcatcagcagcgcggcgagcaggtagttcgcgatcagcgatgagccgccggcggccatgtacggcatggtcatgccggtcagcgggattaccagcgtgatgccgccgaccacggtgaatacctggaaggccatcgtgaacaccagtccggaggccagcagcttgccgaacccgtccttgatcttcatggcggtgatgaacccggacgcgatgatcagcaggtacagcaccagaacggccatcagaccggtcaagcccagctcctcgccgaccgacgaatagatgaagtcggaattcgcgaacgtggtcagacccggctgcccgtgacccaggccggtgccggtcatgccgccggaggccatgccgaagatgcccgtgaccagctgccacgagccgcctatgcggttgtactgctcgtcgctgaacgggtgcagccatgagtccacgcgctggccgacgtggctgaacacgctggccgcggcgaccgcgcctacggcgaacgcgatgaagccgatgacgatccagcttctgcgcccggtggccgcgtacagcatcgcgacgaacatcgcgaagaacatcagcgacgtgcccagatcgcgctgcatgatgagcacgcccatcgagatcagccacaccatgatgatcggaccgaggtccttgatgcggggcagctggagtcccagcaccttcttgcctcccacggcgagctggtcgcggtggtcgaacaggtaggcggcgaagaagaacgcgaggaacagcttggcgaattcggcgggctgcagcgaatatccgccgatgcggatccagatcttggcgccgttgatgttgcgccccagaccggggatcatgggcgacagcagcagtatcaggcctatcaccatgttcacgtacgagtatttgcgcagcacacgatagtcgcgcatgaccgccacgaggatgccacacagcgtcagggctatgcacaaccagatcagctgccttgagccgaccgaggaattaccggacttgtcgatgcgcgcgatcatcaccacgccgatcgcggtcagcatcagcacgcatggcagaatcgcctggctggcgtacggcttgaaccgcagcagcagtccccacagcacgaggaacagcgcgccgaccacggccagcaggccgatgtagttggcggggaagtggccgtagacgcgcaggaacatctggtagaaggcgacgacgctgatcagcatggcgaacagcagcagcgacgcctgacggagacgtatggggatcattgggcgtcaccgccgtctgtgccggtggacgatgcgtccgtgccggtatcgcccgcggtgccggccgcggtgccgccgtcggtctggctgctgccggcgcttgagtcgccgtccgtgccgttcgacccggatgagtcggatgagtcggatgagtcggatgagtcggacgtgccgttgcccgcgtcgccggacgacttggacgtgttggaattgtcgttgaagttgcttttctcctgacggatgacctgcacgtgctggatggcctcgtcatagctgttgaaggtgatgccgtcctgcagctggtcgcgccacgcctgcggcagcgagtcgatgtcgatgttcgtgcgcttgacctcgtgcgacagcgccaggccgaacacgttggtgttcacgccttggtacacggccaccacgccgtctgcgttgccgatgaagtatttcgtctggctccagcggtaggcgccgaaagcgccgcccgtggcaagcgcgagcgcggcgatcacgatgaggattgcgatcagacgattgcggcggccgcgcttgcgcgtctccttgcgctgcgtctgccgctcgtgatggatggccttggcgacgtcgggatcattgggatcgtcggtgacatggccgtcacgcttctggatgaccggtatctcgccggtgtcggggttggcgcgttcgccgttctcctcgcgcacggccgacggctgcgcgacgcgcggcgacggctgcgaggcgggctggctctgtatcagcgcggcggcgcgttgcgctggcgatgcgttcgcgtcgcgcagcatgggcgcggtggcgacaggctcgttgaggatgtctgcgatgggctccaggctggcgctcgccgctccggcgaccagtggggtctggtggggcaggtcgaaggcatccgcgtcgagagccagcgtggcgtcggcgatgaccgcggtcacgttgtcggtgctgccggccttcaaggccatcgaaaccagctgctgggcgcattcctcctgatcggagtaggcggtgagcgtctgctcgatggtggaatcctccagcacgccgcacaggccgtcggagcacagcatccaacggtcggttggatgggcggcccgaatggcgatgtcggggtgcggatcgatgtcgaagtcgccgagcacgcgcatgacgacgttgcgctgcggatggttgcgcgcctccgcggggctgatgcggcctgtgtcgatgagatgctgaacgtagctgtggtcctgcgtcatgcgggtcaggcgaccgtcgcgcagcaggtacgcgcgcgagtcgccgatgtgcgcgagcacccagtagcccgcgaccagcgccacggcggtcatcgtggtgcccatgccggcgagcttgcgctcgcgcttcgccttgccgacgatcgcgtcgtgagcggccatgacggacgtttccatcatccgggcgacggtgctcacgtcgccgttgacgtcatcgtgctcgatgtgggcgagtgaacggatggcgatggtcgaggcggtgtcgccgccggcatggccacccatgccgtcgcagatcgcgatgaggtgctccccggcgaacgcggaatcctggttgttggagcgcacggtgccgacgtcggacaccgtggtcgagtacaggaacaaggtctgtgatgcaacggaatttggcatgagccgtcacctcaattcgaaggtggtggcgccaatgcgcaccggcatgcgcgggggcagcagcatgggcatgttcagccgctgctggttgacgatggtgccgttggtgcttcccaaatcctcgatcgcccattgaccggaggcgggatccttatatatgcgggcgtgatgcgaggagacgaattcgtcgtcgagcaccacggtgttggacgcggcgcgtcccagcgtgatggattcgctggtcagcggcacggaggcgccggccttcgggccatcgatgatgaccagcagtgtgggaccggattgcggcgtgcgctgctggctttggcgcggcggcgtaacgggcgcggtctgtgcggcggccgggccggacggtgccgggccgtcagaggatttcatcgcgcgcttgtctcggcggcgtcgggcccgcgacggctgcgggctgaacgcttcgatgtctttgtgcagcgatcgcaccgcaagccagacaaagacccacagcaggatcaggaatccatacttgaggatcgcaaatgtcagttcggtcataacggaaagtcgactcctggctcggggtcactcctgctctcgtgaggaagcccagaacaggatgcgggtgcggccgatggtgatggtattgccgtccagcagcgtcgcggccggcacctgatggccttcgacgtacgtgccgttggtcgagcccagatcgcgcgcgatgacgccgttgggggtcaggtcaatttccaggtgcttgcgggagatgccgggatcgtcgatgacgatgtcgcagccggagccgcggccgatcaccgtcttgctctcggtgagcaggtaggggttgccgttgatgtcaagcatcggatggtcctcggcctggtcggtggtggtcacggggaccgcgttgccctgcacggattcggagctcaggttgaagctgcccttgggcaggtcgaggtcctcctcgaagatgaccatcacggggccgacgaacgcataatgctggctcttggcgtattgcgtgaggttgtccgccagctcgttggcgagcacttcgctgccccactgttcgatgcgatcgaagtcggccgtgctgagcttgaaacggtattcgttcggggctaccgtgcggtcgcggccgaccggcatggcttcggcgtcgatctcgcgctccagggcgctggaaaggtcgacaggcttcaggtctttggagccgaacttggaaaagactccgttgaccgcgccttctacacttttctcaaaacggtcgagaacgctcatggtgatccctttctatatccttacccatcctatacgtcagtggggaagtcaattgtgatttctgaggaaaaagcctgtttgagcgcaaaatttccacttctgacacggtgttgtggggcgtgagacctatttggaccgatgccgtccgcctgatgcgccagcccgcggggcgatcatgggggaggcaagggggagggcggccggcgtggtttgcccagtgcggtggctaccgtggtgggcatgaacgatatgacgactcttcatgatgcaatcggcgattttccccgccgcaaggcgcagacgttgcggttctcctgcggtgccccgcgttccgcgaccgcgattggcgacggttcccgcgtgctgttcctgcgttccgacggccctgaggacctggtgacctcgctgtggctgagcgtgttcgacgcggacggcacacatcgggaggtgctgctggccgacccgcgtgtgctgcttgcggacgctgatgacgaggacgtgcctgccgaggagaaggcccgtcgcgagcgcgcccgtgaaggcggctcgggcattgtctcgtattcggtggatgcggctggccgccgtgtggtcttcacgatcaacggtcagctgttcctgaccgagatcgccgaagacggcagcggtcgcacccgtatgctggcggcggatgacatcgccgcaggagagggtgccacgccggtgcttaatccgcgcatatcgccggacggcaggcatgtggcgtacacgaccggcgaacatctgatgctggtcgacatcgcgccgcagtggccgtctgacagtcgtcatgatgacgccaccgacgacgactgcgacggccagccggcgccgcacgcgcacggccaccgctgcggcgacgaggagtcgggcgccccctacgacccctccgccgacaagctcagcacgctgtggagcgtgtatccggacgatgacgccgacgagaacacgtggaagatcggtctggccgaattcgtcgccggcgaggagatggaccgttacgacggcttctggtgggggccggactcccgtcacatcatcttcgagatgttcaacgcggcacctgagccgatgtggtacatcagcgacccggcgaacccgcagacgccggcctctggccgtcgatacgcgcgtgcgctcaccagcaacgccgatgtgcgcctgacgctggcggagctcgcgtacgacgggcatgacgagtatgcgggactgggcatccagcagatctcctggaaccgcaaggactatgaatatgtcgccgcggtgcactggtccgccggccatgagccattgctgctggtgcagaaccgccgacagacgcgtgaccaggtgctctcggtgcatctcggctccgaggcctctgcgggctcggcgccggtcggctccacgaccgtgctggaggagcatgccaacgaccagtggctcgacatcatccagggcacgccggtcttcacaccggacggacgcctggtctgcgcgctcaacgacatggacgccgacaccaaccggctgacggtggacggccgcccgttcacgcccgccggctggcaggtgcgagaggtgctcgacgtcaccgatgaggacgtgctggcggtcgtgcagcgcaccccggaactggacggatacgaggcgcccgacggactgagcccgtggcgaggcaacgccgatggccatgacgcccgcagcttcgacgtggtgagcttcgattatgatggcaatgtgctgccgatgaccgcacggcccggctcctggtcggccagccggtgcggcgagggcctggtgatctccgggcgcgacatggactcggcgaaatccgtgatgtcgcactccttcacgatgcgcccggtcgacgggggagccgcgccggaaaacgatggcgatggctccgccgcgatgagcacgctcgtctgcccgatcgacaaccatgccgccgaacccggtttcgcgccgaacgtgcgcttcgcccggctcggcgagcaccgcctgtacacggccatcatcgcgccgagcgccgatagcccgtacgcgaaggccgacaggctgccggtgctgctcaagccgtacggcggccccggattccagcaggtcgtgttcaaccaggcgtactactgggacgcgcagtggtgggccgaccagggcttcctggtcgtcaccgccgatggccgcggcaccacaggccgcgggccgcgatgggaccgtgagatcttcgagaacatgaaggacgtcacgcttgccgaccaggtggaggcggtgcatgcgttggcccaggccgtcgaggagctgaaccgcggcaccgcgcaggacggcgacgcgtcgcgcatccccgccccggacctcgacaaggtgtgcatgatcggctggtcgtacggcggtttcctgtcggcgctcgcggtgctggacgccccggacgtggtcaaggcggcatgcgccggcgccccgcccaccgattggacgctgtacgacacgcattacaccgagcgctacctcgggctcgacccggcggcgtacgagcgcaacagcatcatcgccgacgcgccgaagctcgcccgcccgctgatgctgattcacggcttcgccgacgacaacgtgaccatcgcgcacagcctgcgcctcagtcaggcgctgatggccgccggccgtccgcacaccttcctgccgctgactggaatcacgcatatgaccaatgacccggtcgtcgcggagaacctgctgacgctgcagcgcgacttcctgcgcgatgccctcgacctgtgaccggtcgcccgtttcggggcggaatggaacggcatcccgccccgaaacgcggcaaatgcgacatcggcggcgattgtgcgcagtatgtccgatatcgcgttcgacatatgggcggttcgtgtccacatatgacctcggcggtgcgctgtgggcgaatccagctcttacggctggggatatactctcactgagcatgatcgggcggaacatacgaaacgaggggtttggtgcgtacgatttggcgaatattcacgcgcgacctcatgcgcatcctgcgcaacccggtcgcggtggtggtgacgctgggcgtggccatcatcccctctctgtatgcatggttcaacatcctcgccaactgggacccgtattcgtcgaccggcaacctccaggtcgccgtcgccaatgaagacaagggcactacatcagatctggtcgggcggctcgacgcgggcaagcaggtcgtcagccagctcaagaagaacgaccggctcggctggacgttcgtcagcgccgacaaggccgtggaaggcgtgcagtccggcgaatactacgcggcgatcgtactgccgaaggacttcagcgaaagcctgatcaattcgatcaccggctcttccgacaagccgaacatcatctactacgtcaacgagaaaaagaacgccatcgcgccgaaaatcaccgatacgggcgccacgaccatcgactcccagatcaatgcgacattcgtctccaccgtcagcaagacactcgcccaaacgatgacgaaggagggcggcaagctcagccagtccgccgacggcacgcgcaccagcgtcgtcaacgacctcaacggcctcatcgagcagctgaacgacatcgactcatcgctcgggcgcatgggcggcacgttcgacgatgcggaaaagggcgtcaaacaggccaagtccaccgtcgcctcgctgaaacgtcagatctcatccgcgcagaaagccgcgaaacagtcgcagaaactgctcacgcaggtgcagggcagcgcccaatcgttctcgtcgtcgcttgcgggcgcattcgacaacggatccgtgcagctgtccggcatcggcgtcagcgtgaacaacgcggcgggagacgcgctcagcgccttcaacaccgcacaaggcagcatcgacgacatcaccaacgctctgcagaagccgatcgacggcgcggctacgctgtccagcgacctcaaggacgcgatgaacaaggccggcatcggccgcgacaccgccatcggcaagcagatctggcagcagatagacgcgctcgacaagaccgtgaacacccagcagggccagctcgacgccttccacaaggacacgtcacagttcatcagctccggcaagagcgcggccaccagcctttcggacgccaccagcaccgccaccggcagcggcatcggcatactcaaccgcgcacgcacgacgctcaccggaaccgtcaccccgaacctgaccgcgggattgagcaacttcgccacgctcagcggcacaatcgacggcacgctgtcatcgctgtcatccacgctcggccagtccgacagcctgtttgacgagctgtccgacacgctgagccaggcgaaaaccaccgtggccggcacgcagaaatcgctcgccgacctcaccgacagcgtcagcggcgtgcgcaccgacatcgccgcgctcggcagttcggccacataccagaaaatcaagcaggccctgaacatcgacggcgacagcttcggcgaattcatgggcacaccagtcaaactgtccaccaaaagcgtctacccgatggacaactacggctccgcggtcaccccgttctacacgaacctggcgctgtgggtcggcggcttcgtgctcatcgccatctacaagctagaggtcgaccgcgagcggctcggcgacgtgaccgcgtcgcaggcgtatctcgggcggtggatgctgttcgtggtcgtcggattcctccaggccctgatcgtcatgatcggcgatctggtgctcggcatccaatgtcagcgtccggtgctgttcgtcctcgccggtctgttctgctcgttcgtgtacatcaacatcatctatgcgctcgcggtcgcgttccggcatatcggcaaggcggtcgccgtgatactggtgatcgtccagattccgggcgcgtcgggcctgtacccgattgagatgatgccggacttcttccgggagctgcacccgtggctgccgttcacgtacggcatcaacgcgatgcgtggcccgatagcgggactctacggcaaccattactggatcgacatgctgcatctgttcctgtacctgcccgtcgcgctgttcatcgggctggtcgtgcgccggtacgcgctgaacctgaacgcgctgttcgaccggcggctggccgaaaccgacctgatgatgaccgagcacaacgcgatggtcaacgagtcggtgagcttctcttcgatcctgaacgagttctcgaacaccgaagagcttcgcaaggtgatccgccgtcgcgcgaaacggttcttcgggcgctatccgcggctgatccgcgccgggctggccctgctgatcgtgctgccgttcgtgttcctcatcctgctgttcgtcatccccaacaaggtggcgatgctgacgacgtggatcctgtcgataatcatcatcgatgccttcctgatcgtggtcgaatacatgcgggaccggtacgcgcggcagctgggcgtcagcgccatgagcgcggacgcgttccgcgacgccgtgctgcgtgggtacacgcaccggcacctgacgttccgcacgtccgggaggtcgccgcgcaggcatgcggccgtctccaaggcggctcgggacgacggtgatgccggggccgccggcgacggtgacatcggggagctcggtgaactcgacggccttgactggccggcgcaaccgatttcaggcaatgacgatgccgaaggcggcaataacggcaatgaggagagcgccggggagaccaccgggcatataccgcccgcagggcatatgccgttcgccgggcaggaggacgagacgcgatgaaaaacatctggaggatcttcacgcgcgacgtctgccacgccacgcgcaacgtcatcgcgatcatcgtggccatgggactgatcatcgtgccggcgctgtacgcctggtacaacatcgccgccagctgggacccgtacggcaacaccaaatcgttgaaagtggccgtggcgaacgtcgacagcggatacaaatccgacctgatcccggtgcgtgtcaacatcggcgagaccgtcgtcagctcgctgcgcgccaaccatgacctcgactggcagttcgtcgaccgcgacaccgcgatcgacggcgtgcattctggcgaatactacgcggcgctgatcatccccaagcagttcagcgccgacatgatgacgctgttctcgccggaaatgaagcacgccgaactggagtactacctcaacgagaaaatcaacccgatcgcgccgcacatcaccgatcagggcgcgtccacggtcgccacgaccatcgaccagaccttcgcgaagaccctcgcgcaggtcgccctcgacctggtatccagcctgctgaaattcgcgcaaagcccgcaaatgagcgagtacgtatccaacgccacgaaacacatttcgtcgatttcgtcgcagctgaagtccgccgcgtcacaggccgactcctacgcaagcctgatgggcgcgacaggcaaaatcatcagctccaccgaccgtctgctcggctcgactggatccagcgcgtcggacgcgaaggaagcgctgaaacagggcacggccggcgtgaaaagcctggacgaggccctagccggcgtctcgacgagcatgagctcgtcgctgtccgacgccgcgggagcctacgacacgatcagcaagcaggtggacgccgcgttctccgacatgggctcccaatcctcccagattaccgacaagctcaccacgctgcagcgcaacatccaatcgcaggccgacacattcggcacatacgcggaggcgctgcgctcgctggccgacgccgcgcacctgcaggcggtcaaggacgcgctcaacaacgcggctcagcaggcgcagaacacgcagaacgagctgcagaaggtcgccgacagcatcagcgacgcctccaagaaaatcaccgacggcaccgccagcgcggacgacacgcgcaaatccctgaagaagcagatagccgccgcgaagcagtcgatcaccgacatggcgaacacgtacgacaccacgatcaagccgcagctcgacgaactgggcaagtcgatgagcgatgtcgtcaagcagtcggggagcgtcatcgacggactggccgccaccgccaccagcatgtccggcctgtccggcgacatcaccggcagcctgtccgacgtgcaatcctcgttgggcgacgcggcgaccaccctgaacgcctcggccgagaaactcgactcgctcaacaagcagctgacggcggtcgtcggaggcagcggcatacccgatctctcgcagatcacgtcagccgaccccgattcgatcgccacgctgctgtccgccccggtctcggtgaaccgcatcgcgctgtacccggtcgccaactatggttccgccatgacgccgttctataccgtgctgtcgatctgggtgggcgcgatcatcctcgtcgccatgatgaaggtgtcggtgtccgaccgcgagaaggcgaaggtgctcggcctcggcgaaacgctgccgatgggcgagacgatgggcgtgaaggaggccgtgatcgccggacggaccgcagggccgggcgcgatgctcgacgtgctgcgcaagccacgccccgagtcgcccggcaacgcgcgacggttcggcctgcacccgtatcaggagtatttcgggcgatacgccattttcggcgcgatggcgctgctgcagggcacgctggtatgcctgggcgacatgttcttcctcggcgtgcaatgcgagcatccgctgcagttcctgatggtcggctggctgtgcgcgctggtgttctcgctgctgatctacacgctgaccgtgtcgttcggcgacatcggcaaggccatcgccgtggtgctgctggtcatgcaggtggccggctcgggcggtaccttcccgatcgagacgttgccgccgttcttccagacgatctgcaagtggctgttgttcccgtacggggtcgatgcgatgcattcggcgatggcggggtcgttcggcaacgaatactgggtgtcgatgggcaagctggcgctgttcatcctgccggcgctgctactcggcctggtgctgcgcaagccggtgatgcggctgaatgattggatcatccgcaatctcgaatccaccaaggtcatgtgacgtgagtcggcgggcgagcggtaggctggccgcgcgggtgcggcggccggtagccgccggttgccggccgtccggccgcccggccgtgacgccggccgaagccggtcgtttcccccgcccgtcgccggcgtgaaaggcggtacagtggaggctatgcaagtgaagcttatcgacgagaaccgctatgcagacgagatgcgcgagacggtgctgcccgcgctcgccacatgccggtccgaaggctggatggcaccggcggacgacgacggtctgccgccgctgcagcgtgcgggcaaactgcattacgtgtgttacgacgcggcgaaattcgaccggttgggcgaggacggcgccgccgccacattccgcggtgccgtggtgatctcccacgggttcacggagttcgccgcgaaatatgcggagatggtgtggtacttcctgctcgcagggtactcggtgtgcgtgttcgagcaccgcggacatgggtattccgcgcgtgacgtcgacaattcgtccctggtgtggattgatgattggcggcggtatgtggccgatctggcgaaattcgcggagacggtgggcaaggattacgcggatggccgtccgctgaacctgtactgccattcgatgggcggcggcatcggggcgagtgtgctggagacgcatccgacgctgttcgacaaggccgtgctgtcgtgcccgatgatcgcgccggtgaccggtatgccgaactggctggcgtcggtgcttgccgccgcgatgtgccggctcgggctgggacggcacatggtgttcgggcagagtgagttcacgccggagctggatatggccgattacgagggcgcgagcgaggcccgcgtgcgctggttccaacagcagcgcatcgacgacccgcatcagcggacgttcgcggcgacattcgcgtgggtgcggcaggcgctgcgactgtcgcgtgccgtgcagcggccggaggcgtgcgacaatgtcgagacgccggtgctgctgttccaggccgggcgcgacgtgtgggtgctcaacgagccgcagaaccggttcgcgcaggaggtcaactccgatggagggaatgtgcgcgtggtacgcatcgagaactcgctgcatgagattttcagcatgcccaatgccgttcttgggccgtatctggagcggattctgggcttcttcggctcatctgagatgccgacgttctgatggtttgtgacggatgccgaccggatgagtccgcaatgaaagatgtcgtgaaacatgccgtgaaacatatcgtgaaacagtcgaaaacgccggccgccgagtcggcgcccgagactgcatcattcgagcgtacgccgaaagccatgctgctgggtgccgtgctagtgctgcttggcggtgtgctgtggggcatcaacgccacagtgtcgaaattgctgatggccgactatcacgccgacccgctgtggatcgcctgcgtgcgcgagctcgcggccggcgcgttgttcctggcctgtgccggtgtgcgtacgccgaaactattggcaggtgcggtgcgcgaccgacgctcctacccgatgctgctgctcgccgcgctgacctgcgtgctgttcgtgcaggtctcgtatctgtccgcgatcgactggacgaactccggcaccgccaccgtattgcagacgttgaacctgctgttcgtgctggcgtatgtgtgcatacgcgggcgccgctggccggggctgcgcgagagcatcggcgtggcgttggcgtttgccggtacggtgctgatcgccaccggaggagatctttccacgctgaagctgccactggtcggattgctatggggcctcgccgatgcggcgtgtacggcggcgctgtcgattctgccggccaagctggtagcgcgatggggcaatcttgcggtcaacggcatcatgttcgtcatatccggtttggtgctgacgccgttcgtccgcccgtgggccagcgcgccgcagctggattggttcggcgtgctgctgatggtgttcaccgttgtcggaggcacgttcggcgcatattggctgttcctggccggcgtgatgcgtatcggctcgatgcgcggcacaatgctgggtaccagcgagccgatcgccgcgacgatatccgccgtgctgtgggccggggcggtgttcacgcccacggatttcgtcggcttcgtgatgatcattgtcatggtgttcctcgtgcgctagcacgcgtggcccgcatgccgacatacagtctctctcgcgtgcgacgcgcttcaccgactgtttgcgttcttaagtgcgcgccgagacgacaagtccgcgcacataggaacgtaaacagggcgatttgcgttcctatgtgcgcatggtcgtcgttttggcgcgcacttaagaacgcaaaaccacgtttcgcccgccaggccaggcgtcgcgggatgtgtggatagtgataggtgagcatccgaatgcatagaacgggggctgccatgcatgagtcatcgtataaggccggttcggggcgacgttatcagtccgggcaggggcgtccgggtcgcgttccgcggatcctcgccactgttgtcgccgtaatcgcgctcatcgtgggcggcctcgcactggttcgggccgtcgcaccccatgcaatcgcgaagctgacagcggtatccgtgcgcagcctggcaatcggcgcggcggcgctgatcgtcgtcgccatcatactgatcgtcatggctcgcgtggcttcccgacgcggcaaccgagtgagcgtgcgtggaaccgcaggcggagccatcgtcgccgtcgtattcgcaatcatgctgaccgtagccgcgctgctgatctccaacctgttcaaggacggcatcgtcaagccgtcatcgcccgacaagtcacctgctcagagtgcgcagaacatgcaacaatcagttgaggaggctggcatctactgcgagtccggctggtcggaactctcatcgcaagggtatccgggtgtgacggacgtcgagatatgcctcaagccgcgcatcgcctacgtcacgttcgataacgaattcgctgccgacatgtaccgcgcgcctttgcgatacaaaatcgccgagatgtttgacgagcaagcgaacagcaccgtctccaagggagactggcggctgttgagtggcaagaaatggtcggtattcagctacaggaccatcattgacaagctccagaagcagtggggtggaaccgtcgagaaaatagaatgacggcggatgatccgggtgcgatgcaaccgcggcacatgaggcgcggacgcggtgctccgcgaaggctatgatggaaacgtgaatgacgtctcgaatcagccggcagcgaagaccccagccgaatcatcctccgagtccaccgaatcctcccgtttcacacgcggagacagcacgctgaccaccgtaggacggatcgtcatggtctacgcggtcgtccagctgctgatggcgatcagtgcgctcgcgtcactgtccagccttgatcccgcggcttccgtgcaagtgatcggcgggtggcgcatcggcctgcgcgtggcatggttcacgctcggcctggtgttcgcgggcaattgcgtgctgtatctgatcggcggatggctcggccgccgggccggagcggacacgtccaaatcccggccgttcatggcactgatgtggctttccgtggtgaccacgcttatcggtctgctcgccgcgcgggcgaccgcatccggctgggaggcgtggttttcgcttctgatcgccgtgatcctttccctatacgcgaccaaagtcgtaaagcgcagcacgcgcatctgagcggtgacatcggcggctggcctacagacgagcgaaacgccgccaatcgacggtgctgtgagtgaacgcaacgcaaagaaaaatcaggtatggtgagacgcatgagcgagcagaacaatcacgatacaacaaacaactcccggcgcaacccggccgcggcggacggcccgttcacacagacggcctatttcgcgggcggatgcttttgggggctggaacgctacttccagaacgtcgacggtgtcaccgacaccacggtcggttacgcgcagtcgaaggtcgaatcaccctcctatgagcaggtgtgtgcgggcgtcaccgacgccgcggagaccgtgaaagttgtgttcgacccagcgcaagtgacgctgcgaacgctcacgctgctgttcctggaggtcattgacccgttctcggtggaccgtcagggcgaggacagtgggcggcagtaccgcaccggcatgttcttcacggacgcgacgcagcaatccgtgtatatcgccgcgctggagcagctggtcgatcggcagcccgcccgcccggcggtcttggtcgagccgctgcgcaacttctacccggccgaggcgcaccatcaggattatctgatcgccaatccgggaggcttctgccatattccgctggccgccatcgcgaacgtgaaacggcggcagaagtatgtggaaaagatctgggacctgacgctcgaacagttcgcggtcacgcagtgcgcggccaccgagcggccgttcgtcaacgcctacgacgaggagttcgagccgggcatctacgtggatgtggtcagcggcgagccgttgttctcatcgcgcgacaaattcgattccggctgcggttggccggcgttctccaagccgatcgcggacgagctgttgaccgagcacgcggatcatcgcatcccggggcgcgaccgcatcgaggtgcggacggccgacacgcagatccacctcgggcacgtgtttgacgatgggccagccaatcggggcggtttgcggtactgcatgaactccgccgcgctgcgcttcgtgccgcgctcgcgcatggaggcggaaggctacggcgactggttgcctgcggtggatggcgaatagccgttcagagagccgttgcgcgccttttcctccgcgccagccatcgccgccattggccatggactagcgcaacggtcgcgatgagactggccgccgcagccaatcccagagaatacacgaatcccggagtgccgaagccgtgggcgatcaccagggcgttggaaccgatgcagatcgccgcgaacgaggcgagcgtcgcgatacgcagccatggcacccagcgcgccgggattcttgtgacggcgagatacaacgatgcgataacgacgacttgcaggcatgatgcagcgacgaattgccacagcatcgccggatcatgcagaaatgcggtttcggggaacattctgatgatttcgcggatggtgttcggcaggcgccaccatttgagccatactagccaagcgtccaccgccactgcgatgccccacgccaatcctgtgcgcaggcgcagctgtggcgacgcgcgtcggatgctgctcttggcgatgagcgtagattctctcatcgtcggctccctcgaaggcgaatcaggtatatcgcacattgtgaaggcgtggttgccgcgaatcgccgccaaacctcatacgaacgggcagacttttcgcgggaaggggcagccatctgcgtttcagggggttgatttcgtgttcgccaaacgtctatctacgtttcgaggggttgccaaaacgcgatgcccggggtattgagcgccaatcgccattggaatcatgcggttttgggggcgcttatacttggccagcaacccctcgaaacgcagatagatgttcggatcaaaccgaatcgccccctcgaaacgcagatagccttctgacagcgctcatctgcgcaatctctcacccgacaaggtgccggtacagctcaggatccagcggccgcgcaagtctcagtgtggagagcgtgaccttcaccgtaccgtctccggccgcgttcggcttggtggtgagcgtcggattgtcaaacgcggcgacgtgcccgacgtaatagtatttgccgtcggcctcttccgccttgcgcatgacgaacagcggaacgaaatgcgtacggccccagtccggtcccacaccgctcagcgcccactggaattcgggagattgcggggtgcgcccgttcttgctgaagtacttcatctcctgtgcgttcaggaactcgtcttcgtattggctggccgcgtacttcacgaagatgggcatggtgttggtgtctttgtcgagcaggtacccgcctacgttctgaggcgtgttctcctttttccatccgcacagccgcatgacgtcggccatggagtatttgcgctcatacaggaacgcatggtcaaaagcgcgtcgccggctctgcgcctcctggaacaggtctcggcaattggccaaaccggtgcgcagcgtgtctgcgagaaagatgcggaacgtgcgattttcggcgagcatgttgacgaagccggagcttaaacgataggccggttcgccctgatcatcgtcggccagcgtctccaccagtggcaggttcccgaaacgtttgcgattcggtccggtgaagtatgagtagtcaagcacgctgatagcggagtcgaactgcgcatccgagagatcagcctgtgggaagtccgcacggatcgcatcaagcagcgcatctcgactgattggcgcggatgcgttccagctgacaggagtctcgtcatccaggcgctcttcggcaagccgacacagccgttcgaggatggccaactcatgagggcgcagcccgggcagcagcaattccgtggccatcttgaggaccgcgtcttcggtgtcggttaccgggtccagctgatcctcaaatgttgtctcgtggttcttgccgccgccgaggctcttctcgcgcgatcgcacgaaatcgaggtagttgctgcgcttcgtggccaatgtatacggcaaggaaggatcgtaggcgtagatatccatgagcatcggaatgcggccgagctcgtatcgcacctgccggtattgttccgatagcttcttcatttcggaccagttggcggtgtccagtgatttcagcacgcgttccttggcgatcgggtcgaagcttatggaggacaacccgatcgatttgcgctgcaggttcttgcgcgcgcggtcgcggtcaccggtgttgccgtacagggccacggggatcaggtagttgttgttgtagttgccgataaaatcgatgaccacgacgctgtccttgtacgggaacttgcgcagtccgcggccaagctgctgggtgaatatgatgctggactctgtgctgcgcagcatcacgatctggttgacggcggggatatcgacgccctcgttgaacatgtcgacggtgaacaggtagtcgagttcgccgtcggtgagccgccggacgtattcgtcgcgtttttcctgcgataacggcttgccgttgacgtctttgctggtcaccgctgccgtgcgataggggcgttccgcttgctggttccaatgctcgttgaacaagcgggacagctcgtgcgcctcctcctgcctgctgcagaacaccagcccggtgacggggatcccgaattgcccgtattcctgcagcttgtcgatgatatagcgcacgcgctgctcggtggcgagctgcccgatctcgtatttgagctgtttcgactccttcgcgtcgagcccctgtgaaacatcgaggcggtgcatgtcctggtccgggtcctcgtcggaaccgagatattctgcgacgccgtaataatggaacgggcagagcatgttttcgtccagagccttctgtagccggatctcataggcgatgttgtggccgaacaactcgaagatgttgatgccatcggtgcgttccggtgtggcggtcatgcccagcatgaagtcggcgtccctgaaatggtcgatgacgcgctgatacccttcggcgcccgcatgatgaacttcgtcgacaagaacgtagtcgaactcgtcagaggcgaattgcgccagggcctccggctgacgcatggtctgcaccgtggcgaacacgtagcgccgatcctgttgtttgctggtgccggtatacagtcccagctcggattgcggacaaccgagcaccttctggtaggatttcatcgccgctttgaggatcatttgctgctgggcgatgtacagcatgcgccggggccggtactcacgcacgtcgaacgcggaaagataggttttgcctgttcccgtggccgacacgatgatcgcacgatgctcccctttctcgcgtagtttcttcaggctcgcgagggcttctttctgcatggcgttcggctggatctcacggccttcgagggacttcagaatgtcgcgccgtggcggcgcgtacttcttgaaatcctcctcatactgtttgatccattcctcggtgagcggcttggaatcggcgatctgtgagtcgatttcatctcgcacctgcgcgaccagttcgccattggcgagggatgagaccttgagattccattcgcgttgagtgttcaatgcggcgccggtaagattcgaactgccgacgaacaggtcgtagtacggggtgccgttgcgcatgcggcgcgagaatacgtatcctttgggatggaacggctgcccttgagcgactgatactgaagagtcggagcctgcccacacgcggacgtccacgcctgccgtccgctgtaggtgaagcagttcccagaaagcgcgtgggtcgttgaaatgattcttcgtcgacgtgatcagtctgctgacctgctcgggcgcattggcatgatgactgcggaagtcctcgaacaaactgagtatggcatcaggagagacgaaggcgacggagatgtcgaaggaatcgctgttcgtgagcgcatcgctgattccatcatgcatggtgaggtcgcctgggcggttcgaaatcagcgttggcttatagctttcgggggcgtcctgccggggttcgatcagtccggagatgacgctttccagcacggaatgcgtggcatcggttttgaggtctgactgcgggttgagtgattctcgcgtattcatggccggctcggttcctcggaggtgtccgacgttgtctgggtgaggaagcgcatgcctgcgatgatgccgacggccgtacggtcgaccggagcccaattcagctgtggcattgcggaaggatccagccaacggatgtccgtgtgctcggtcagccgtggcatgccgttgattaggtgacaaatgaatgtgatgagtcggaccgtgccgaagtcgtaggcgtactcgctggtgcacacctcatcggcgacctcgatctcacagagcagttcttcttcgatctcccgatgcaatgcctgacgagccgtctcgtaaggctctattttcccgccggggaattcccaatatccggcgagagattttcccggtccgcgttgcgcgcataacaccgctccatcgcgtacgatcgccgcacccacaacgttgatgatcttggcatgagagtccatggttacccgggatacaacggcggcgtttgataatgcgattgtgcggacgggtgtcatgagtggcatgtgaagtgattgcaattgctgtcggaagtttcagctactgaaagtttgacacaaaccgctcggcaaataccaccaacagcaggtatgaccgcggcgccgcggttggaggtcggctgcccgcgatccttcagcgagacgccagcacaaccgtcaccatggcagctgcgccgcgtcgctgtcggacgaaggggccacaagattcgcgtcgctcgtgtagctcgtgcccggctccggtgcgacggtctcatgcggatccggaatcgctgcggctgcgctggctgtgctcgcgcccgtgctcgcgcccgcgtcaccttccagtcctctggccacctcatcgagaaaatcgtcgacttcgtcgatgtcgtatccccctctgaaacgcacattgctgaaggtcttctccttgatgcgccttgcgagcgagtggtcgccggtcgtcatgcggtcgatgatttcgtcaaggaagtcgtcgacctctctggtgctatacccttccttgaaccgcactgtggtgaacgttctcgatgtgatggcgtctgcgctgatcatgactgatcctgtctgtcgctggatatctcgcgcttccactctactctcgcctcgcttgttggaattgcgattatggaagcagcattgaagcccgccgcgccctctgccgtcacggtggtgatcaccagctgcaatcagggagcgctcatccgtgaagcagtcgaatctgcgctcgcccagacgattcgtcccgattgcgtcatcgtcgtcgatgatggttccgacgatccggcctccatagcagtgcttgatgggctcgccgaactcggtgcgccaggacgcgacggtaccgctcccgccggccagtttgcgccggtcctcgaaaaaacatccctatatcaattcccatcctgcccacctacaggacgggacgattcacctgctcggcgctagactgaagatgtcaatcgtagtcaaaccaaaggcggtcatatcatgattctcgtcaccaccacgccgtcggtcgacggttacgtcatcaatagctatcagggcatcgtgttcggtgaagtgatttccggcgtcaacatgttcaaggatatcggcgccggcctgcgcaacatgttcggcggacgcagccagggctatgaagaggagcttatgaaggcgcgcaacgaggcgattcttgagatgcagcagcgggccgaggcaatgggtgcgcacgccgtggtcggtgtggacatcgactacgaggtgcttggcgccgacaacggcatgctgatggtcaccgcgtccggcaccgccgtgcaactcgcccgccgcggctgaactgtgccggcgccagcttgtgtgccggcaccggcgttcggcgaaacatcgcacggcgacggtatcgtaaagcgttgcgccgcgaagcgcgacggatgataccggtggaaaggaccgtgtgatgactcaaccgcaggcatatgcagtgaccgagggcgacgggttgcccgtggtgttcgtgcatggcatgggcgtggaccaccgttcgctgatgctgctggatgaggcattcttgtgcccggagtcgggcgctgccgcgtcgcggtcgctgaagcgcatatatctggatttgccggggttcggccgcactccggcactgccggcacgcgcgtgcggtctgccggagatggccgactggctgcagtccgccatcgacgatctggtcggcgcgggggagccgttcgcgctggtcggcaattcgatgggcggtgcactcgcccgtgagatggtggctcgcgagtcatcgcgggttcgcgggctggcattgatcgccccggtggtggatccgcggcgcactcgtcgtcatgtcgccgagcatgtgatcgccgagccgaatccgacgctgatacacgcgctgcctcaggatcagacgttcgatttcgtaaccatgggcgtcaaccagtcattcgccgcgtggcgccgctatcagtcatatattttgccgggcatccgtctgtgcgaccgtgacgcctgcgccagattggacgcccgttattggctgaatgacgacccggagcgcgtattcggcacttatgccgggccgaccctgttcgtcaccggacgacgggatcagatcgttggttttgaagatcaacgggccctgttgtcgcattatcccgacgccacgttcgtcacgctggatgatgccggccacaacgcgcacatcgaccagcccgaagcggtgattcatctgctccgggagtgggccggccggctgtgacggtaggcgtccacgcgatgccgggcgcggcaccacgtatgacacgcgctacactggcgcccatgaccggtaaaatcgaagcctacgaccatctgcttgaaacggctcgtgcgatacgcgagcaggtgttcatccgcgagcgtgactggcggcctgaattcgacgagtgggatgccgtggccgtgcatctgctggcgttcgacgggaatcggaccgtggcgacatgccgattctatgcggatcctgaccattccgatcagccgggaaggtacgtgatcgcgcgtctcgccgtgctgcccgacgcgcaaggccgcggtatcggctcccaactgctggccgacgccgaacgccgtattgcgcacagtggaggaaccatcgccgcggtacattcggagaacgaccactacaagttctacgagcggcgtggatatcaactcaccgacgaactctacgacgacggccgccacggttggttgatcaaggcgctcatatgatgcaacttacgggttgaaatagccgaaatccgtgattccccgtgcgaaatcgccgttttcgggcccgaaaacggcatttttgcacggggaattgcccagaacggcgatttcaacccgtaatttacgggagcgagtgggggctctttgtagtaatggccggttatcacgtgatccgattgatctcgcaatcagttggtttcgcgcgacgacaacggcgacgacggaggacccggatacggcaccggggccgaccggaacgaattccacaaacccgtcagatacctcaacggcactgactagaggaggacgccactaggcacacattttggcctataacccgtcaaaacgactagaccagacaaagcaaaagggctggaatcgttggattccagcccttctcggctcgtgcgagtggggggagttgaacccccacgagcatacactcactgccacctgaagacagcgcgtctaccattccgccacactcgcagacaaagagataacttaccagcgatacgcggataatgcaattcggcgtgtcgcggtggggcgccgtaatgattgtcgcggcgggtgctgcggtgattgttgcggtgacgcccgccgcaagcacccgtcgcagcgctccctcacctcacccgcgcggcccgttcgcatagaagcgggcaagcgactcgtcgcggaattcgtcgaagtaaccgccgtcaatcgaggcacgaatatcgtccagcagctttacgaagaaacgttcgttgtggatcgtcgccagcgtgaacccattgaattcgcgggcgcgcagcaagtggtccacatatgcgcgcgtgtaatgctggcacgtgtagcagtcgcacccctcctcaagcgggccaaaatcgaacttgtgctgggcacgcttgacgttgtagcgcccgtcgcgcgtgaaaatcgccccgttgcgcgcgcacctcgcgggtgcgacgcaatcgaacgtgtcaccgccattctccacacatgcgaagatgtcgtcgaccgaggcgatgcccagcacgtgccgtggccggctttctggcatcgcgtcgcagatccacgcgcacgtgtctgcgatgatacgcttctcgatcgcgccgccgatgcccacgccgtcgaagtccagcgaggcgatctgctcggccgcatgcctgcgcaggtcctcatagttcgcgccctgcaccacgccgtacagtgcctggtacggtttgcccagccgctccttggtcagccgctggtgctcggccacgcaacgctgcgcccaacggtaggtgcgttccaccgaggcttcctgatacgagcgcgtgttcatcagcgtcgttaattcgtcgaacgcgaacatgatgtccgcgccgattttatgctggatgcccatcgagatttccgcggagaaacgatgacggtcgccgttgagcggcgatttgaatgtcaccccatcctcgtcgacgaacgccagtcgttccttgcccgccgcgatcacgtcgtccgatttcatgccggtcacgtccatcgccagcgtcttcttgaatccggctcccagcgacagcacctggaatccgccggaatcggtgaacgtcggcccgtcccagttcatgaatcgcgcgagtccgccggccgcgtcgagcacgtcctggccggggcgctcgaacagatgaaacgcgttggacagcagacattgcgcccccagctcgcgcatggtctccggcaggacggccttcattgccgcctgcgtggcgaccggcacgaaggccggcgtgcggatgtcgccgtgcggcgtgtggatgatgccggtgcggccgtaacggcggccgccacggcctttgccgtcagctgaatcgggtagttgcgtaagggtttcgaaaaagaatgcgctgcggtcgccgggcctgccatcggccgcgccgcgcgggtgctccagaaaactcgtcatacgattactctaggcgatggccgggaaggcggaggacggcgctcggaaagcctgtctcgggctttcccggcggttcgtggtgtatcgttgtctcaagctgtccggctgatgcgtccgcttttcggacgggatatccgcgggtttcagaagaatcgttttgctgctgaccggtcggaaatgtcgtacgaaacaaggctgacggcctgcttcatgataacggtaggtaattcattctctccttccaatcaacgttcaggaaacatccagagcaggtatctttactcttacgtagagcttggcggcgcgctggctcacagatacgagacccaacccgcctgctgatacttacgaatactgaaggagacaacatggctgacaacaacaatggatactggcccgccgataaggcggccagcctgagcagccgcagaacgacaacctgcagcaggacgctccgacgacctcggatgcgcaggatcagcaattcgcccaggagccgctgggcgcgcctcaggaagcgcccgcgcagaacgacgacgcgctgcagccgcagcccgaagcgcaggatacccgtccgacccagccgttggcgcctgtcgcgccgacctcagagcaggccctggcttccgaaccgactcagccgctgcagccgcagccgacgcagccgctgtaccgcccggcaccggaatacggtgcctacggcccgactccgactcagccggagccccagcagccgcagccgacccagcagcagaatcagaacacgggcaacggcggcaacccgttcttcaacggcaacccgttcatgacgcgcccgacggacgatgcctcacagcagaatcgccagaacggcaacacgccctacggtttcccgttcggcccgcaaggcccgaacggcggccaggatcagggcatggctcagccggaagacggcggcaacgcgtctcgcggcggaagctccgcgaccagccacatcgtgaccgcagtggtggccgccctggtggccgcggcgctgtgcctcggcgttggatacttcgcgctcacctatggttgggtgagcacgccgacgacgacatccctgaccaacgtccagtcgaacaagtccggtaccggcagcgccaccgccaagacgggcgaggccgccgactggaagaccgtggcgagcgaggtctccggctccgtcgtgtcgattcaggcggcgctgagcaacggcaccgccaagggatcgggcgcgatcgtgagcgccaagggctacatcgtcaccaacaaccacgtgatctccggcgcccagcagattcaggtgacgctgtccaacgggcagatgtacaccgctcaggtggtcggcaccgacaccaccaccgacctggcggtcatcaagctcgacaacccgccgagcgacctgaaggctgtggaattcgccgactccgacaagctcgccgtcggcgaggacgtcatggccatcggcaacccgctgggctatgacgacaccgccaccaccggcatcgtgtccgcgctgaaccgcccggtcaccgtgaccgatgactccggctccgacatcgtcaccaacgcggtgcagatcgacgcggccatcaaccccggcaactcgggcggcccgacgttcaacgccgccggccaggtgattggcatcaactcgtcgatcgcctccaccgcgacctccagtgattccgccggctccatcggcatcggcttcgcgattccgtcgaacctcgtcaagcgcgtggccaacgagatcatcaaggacggcaaggtcaagcacgtggccctcggcgtgacaatcaccaccggcacggtcgaggcggacggcgtgacccgcgccggcgccaaagtcaccgcgggaacctccggctccgccgtggtgtccggcagccccgccgacaaggccggcctgaaggtgggcgacgtcatcgtggcgtacgacggcaacgcggtgagcagcacgtattcgctgctcggctatgtacgtgcgtcggcgctcaacgacaaggtgacgttgaccatcgtgcgcggcggcaagaccatggacgtcgaggtgacgctcgacaaggaggagtccgcggtgaacggctccggcagctcgaactcgaacaacaaccagaacaaccagaacaaccagaacaaccagaatggcaacggccagaacggtaacggcaatggcaacggcaacaacggcaacggccagaacgggtacggcaacaacgactacggcaacggcgggttctccgatccgttcggcctgtggtaaattccgctcccgaagccgctgacgctgcctgacggctgacattgcccggcagttgacatggctcgatgatggaggggccggtgcgcttgcgccggtccctccacttgtgtctgcggccatgttcccgcgggccgttggcgtgtcctttcgcagttgttgctagagttggtagaagccgcggatggcatgtgccgccgcgcaacataatcgaacgaacaattgaatatcgaataatctttttacgccgtgtatcgcctgccctcgccgttttaggcagtgctgccgatgggttaacaaggcgtgggtcgcatgccgttcgtgattccgcgcttgttgctgggatgacggacggtccgtatacgagcgtaaggagatacgatgcgtaagttcatctatctttgcagtcatctgtgtgttcaagtgccgctgttgccgattgccgtgctcacggtcattccgcttgccgtgtgcccgtcatggcggccgtggggagcggcggatattcctatactgggcaatcccggcgtgggccagtggattgtcatcatcgtggtggcgtacacgatcatcgacaccgtgcgcggcatgatcgacgatttgcggcatggccgggtcggtgtggatctgctggctgtcgtggcgatcgccgccacggtcgccgtgcaggaatactgggcgagctgggccgtggtgctgatgatctcgtccggcgaagccatcgaggaatacgcccaatccaaggccgaaagcagcctgaccgcgctgatgacggccgcgccccagaccgcgcacgtcgtgcgacggcccggcgtgggcgtcgctggtgtcaacaccggcgacggcagcgacggcagctccgacgaccggggcgacggcttccgcaaggtcgccgctctgccgtcttccgccgccagcgggtcgtccgacgctgcgacttcccactatgacaccgttgccgtggaatccgtcacccccggcgatgtgctgattgtgctgcccggtgaaaccgtgccggtggatggcgagctgttgtccggatccgccacgctcgacctgagcaacatcaacggtgagccggtgccgcgtggagtgttcgcgggcgcccgcgtcatgtccggcgcggtgaacggctcgaccacgctgaccatgcgtgccaccgaagccgccagcgactcgcaataccagcgcattctcgcgctcgtcgcggccgcgcaggattcccgcccggcggtggtgaagaccgccgatgtgctggcagtgccgttcacggtgctcgcactggcgatcgcggccgtggcatggttggtgtccggcgtgccgacgcgcttcgctcaggtgctggtgctggcgaccccttgcccgttgctgatcgccgcccccgtcgcgtatgtggcgggaaccggccgactagccaagtcgggaatcctgatcaagacacaggacgtgctggagaacctcggccgcgtcacgcacgtgttcttcgacaagaccggcacgctgaccgtgaagcagccgcaggtgacccgcgtcgagatgctgcccggcgccggcactcacctcaatgaggaccacgtactgatgatggcgggcgtggtcgagacctattccgtgcacatcctcgccaaaggcatcgcgaaggccggcacggaagctctgtcccggctgcatcggcggttcgaggaggggcagcggctatgcccgcagcccgatgcggactggcctggtcacgggcgcgattatccggtcgtcaagcacattgatgaagacgccgggaaaggcatctccggcgaagtgaatgggcataaggtgcgcgtaggcagactgtctttcgcggcctcaagcgaagatgggttcctgccggttgagcggatcgtcccgggccgggccacgactgatggagaccggcggtccggaaaacaaggtgaggggcggcttgcggacgagatccgtacccgtttcggcatgctcgcgccggatgaaatggcctcgtacgtgtcggtcgacggtcatctcatcgcccggatcgtcctgcgtgacgtgccgcgcgctaacgccaagtcggcgctcgcgagcctgcgcggtctcggcgtcgccaagctgtccatgctgacgggagacaagcgatcctccgccgccatcatcgccagtgaggtcggcatcgacgacgtgcatgcggaactgttccccgaagataaggtcaccgctgtcacgaccgcgaccgtgacgccatcgcgcggcgtgacgatgatggtcggcgacggcgtgaacgacgcgcccgtgttggccgccgccgatatcggcatggccatgacggacggcacgtcgactgcggcctcggagtccgcgcaggtggtgatcctgaacgacgacatcgccgccgttccacgggccatcgccatcgcccgccgcaccaagcgtgtgatgctgcaagccgtgctggccggtctcgcgctggccctgatcggcatggttgcggcggcgttcaacttgattcccgtcgtggtcggcgcttttctgcaggaagccatcgacgtggtaagcatcctctgggcgctcaccgcactgcttgaccgtgactgacgggccgtggtcgacgggcgcagctgggccggtcgtggtcgaccggtcgcgcccgtcgccggacgatcgggcgagaacgaatgtgacattcgacaacaatgggggcaatgccgggaaatcccgccgttgcccccttccgtgattcggtggcttgcgataacctataacgcgtgactgaatctgagaacaatgaacttcgtatcgccgtgatcggcgccggtcccgctggcgtctactcctccgacatcttcctgcgccagctgaagaagctcggcgaggagctgggtctgggcaccaaggcccgcatcgacctgttcgagaagctgccggtcccgttcggcctggtccgttacggtgtggcccccgaccatccgagcatcaaattcatcgcatccgcgctggagaagacgctcgacaaccccgacatccacctctactgcgacgtggaattcggcaaggacgtgaccctggacgacctgctggcgcgttacgacgccgtgctgttcgccaccggcgccgtcaaggacaaaccgctgaacctgccgggcgccgacctcgacggcgtgtacggcgccgccaagttcgtcgaatggtatgacggataccccacgggtgcgcgcgaatggccactttcggccgagaacgtcgccgtgatcggtggcggcaacgtggcgatggacgtcgcgcgcgagctcatgcgcaacgccgacgacctcaaggccaagaccgacatccccgacaacgtctacgaaggcatccagggaaacaaggccaaggtgctgcatctgttcatccgccgtggcgtcgcccaggccaagttcagcgtgcaggaactgcgtgagatggagaagctgcccggcgtgcagctcatcatcaacgaggacgacttcgagctggatgacgacacgatcgaagaggccggcaaggacaagctgacgcgccagatggtcgaggagctgttcaccatccgcgagatggccgaagacatggaagacgacggcgacgtcgattacgagggcaaccccgcagatcgcaagtattacgtgcacttcaactccgctcccaccgagatcctcggcaaggacggcaaggtcgcgggcatccgcgtggagaagaccgagaccggcgccgacggcaagatgcaccgcaccggcgaattcgaagactacccggtcgaggccgtgtaccacgcaatcggctacaagcccgccgaagcgcccggcatcacctatgacgagaagggcgcccatctggccaacgcgaacggcgatggccgcatcaccaccgaggccgccggcggtgacgtgcgcgaacgcctgtatgccaccgggtgggccaagcgcgggccggtcggcctgatcggctccaccaagtccgacgcgttgatgatcgtcaccaacatgctggaagacctcgccaaggcggccgaaggcggccgtgtggccgtcgaccgcgaccccgagtccatcgaccgcctgctcgccgagcgcggtgtcaagccgattgacttcgccggttggaagaaggtcgacgccttcgaacgctccgagggcgcgaaggaaggccgcgagcacaagaaggtcgtcgagccggatcagatgcgtgagcttgctcacgcctgagcgacctgtagcgcgactcgtatacatcgatcaagccgcctcccgcgtgacattgcgggcggcggcttgtttttgcccgtacttgtatcatcccgtgcctccggaatcatttcattgtgctcaaggcgcatatccagccaactgtcagacagtgaatttagtgtgtgggctatggacggtaaattgcatgtgcgcggccacttcaacggcctgaaaacgacgctgctctttgcgttgatgtgggccatcgtcatgttgatctggtgggccaccggcggtggccgcggcacgctgggcgtatatatcgtcatcggtctggtctccacgttcagcacgtactggttctccgacaaactcgccatcgcctcgatgggcgcccacgcggtcaccgagcaggaagctcccgcactgtaccgcatcgtgcgcgaactcagcgccaaggccggcaagccgatgcctcgcatctacgtcgccccgaccatgagccccaacgcgttcgcaacgggccgcaacgagcgccatgcagccgtatgctgcacgcaaggcatcctcaacatactcaacgagcgcgagattcgcggcgtcctcggccacgagctcatgcacgtgtacaaccacgacatcctcacctccgccatagcctccgcactggcgaccatcatcacgtatctgggatactcgctcatgtattttggcggcggtcgcagcaacgaccgtgacaactcctccggcgtcttcggtctgatcggcgtgctggtgagcgcgattctcgtgccgatcggcgcctctctgatccagatggccatctcccgcacccgcgaattcgacgccgacgaggacggcagccgcctgaccggcgaccccgaagcgctcgcctccgccctgaacaagatctcctacggtgctcagaccaatccgatgccgaaaaccgcgggcacgcagtcggtgtcatccatgatgatcgccaacccgttctccgcgcgcggattctcgaagctgttctccacgcacccacctaccgacgagcgcatcagccggctcatgcagatgtcgcaggagatgcgcaattccggcatcggcggcggcagcagaccgcattacttgtactagcttcgttgcgcaaggctcgcgggcatcgccgtcatgtgatacactgacgacttgtgcacaaaaagcactgcggatgtagttcatcggtagaacgaaagcttcccaagctttaaaggcgggttcgactcccgtcatccgctccacttccctcaacgataaggctttaaaacccaatcattccaacgattttcaattttgtaggcacttgcccaatcacacgatttttgtcgaattgttgtcaccgtgttgtcacgaggtgtgtaaaagaggattcggagagtggtttgggctcaagagttttcccgtggtcaatgtttctgctgcagtgatcttgctgctgatggatgttgccacgtaatcaagatcggtgtcgaataggtctgcataagtatcccttcttagcttggcttatgacaggatttttctctgaattcagtgctctttctctgaattcagagaaagaatgtataattcagagaaaaattcagagattcagagcaggcggtggcgaatggcgcacgagtatggcaaagaaaccctgtccaaggaattcaaaagcgatcgcgataaaggtctgccggattccgaattagtggaggccgttgtcgccttagccaatacggacggcgggtgcgtgtatctgggcgttgaggacgacggcaccgcgaccggtgtccagcgcaagcatcaagatcctgtcgggctgtcagcgatgattgccaataaaaccgtgcctccgatatcggttcgcgcgcaattggtgggtgatggcgtcaccgtcatccaagtcgatgtacccaagtcacatagtgtggtgtcaactaagtcggggagaatcctgcggcgcatgatgaaagtggacggtacgcccgaaagtgtgcccatgtatccgtatgagatcgctacccggctttcggatctgggtaagctcgactactccgcccaaccggttccgggggccacgcgggaggatttcgatccgttggagcgcgaccgcctgcgcaagatcatctccacctaccgatccagcgaccgtaatcttctagagctttcagacgaggatctggaaaaatcattgcgtcttgtcgtatcggcggatgggaatgtaacgccgaccttgacaggtttgttgctcatcggcagtgaggagtcactgcaacgtcttgtcccgacaagcgaggcggctttccaagttctggtcggcaccgacatcaaggtgaacaatacatatcgcggcccgctgctcaagaccatagagcagatagcggagtcgttcgctccttggaatccaggaactgaactgaccgtgggtttgttttcctcggtggtgcccgaattcgacgagagggcgttcagggaagcgttggtaaatgcattcggccacagggattactcagttcttggccgcgtgcgtgtgctggtggatgacgcgggactgacgatcgccaatcccggaggattcgtggaaggcatcaacattcacaatctgcttaccgcggaaccgcatggacgaaacccatgcctcatggatgcgttgaagcgaactgggctagccgagcgaaccggtcgtggaatcgatcgcattttcgagggggccttgaactatggtcggcccttgcccgactattcgagatccaacgggcggggtgtttcggtgctgctgcctcggagcgcgcccgacgaggcgtttgtggaattattagccgaggaacgcgagcgtagcggcaagtcaatgtcgcttgacggtctgcttattctggataagctcaagcgagagagacgttgtggctttgacgcgttgtcagagtccttggatatgagcgatcaacgtctgcgcactgtattggggcagttgacggagtctgggctcgtcgaaagctccggcactaacgctcgtcgtacatacacattgggggcgaaagtgtatcggcgcagcggtaaaacggtggaatatgtcagacagtcaggcatcgacagggtgcgttaccccgaattgatcatgaagctgatgcgcgagcagaagtcggtaagcaaaaacgacgtgatggagctattgcatctcgacgagaaccaggcatattaccaattgcgaaaactggttggtgagggacgcgccaaaaaggtgggtggtggtcgcaatgtacgatatgaggaaatgcaacgagacgacgatggaatatcgggcgaacagttctgattagggattatcccctgaatgcataaagctgggattcagcacagcaaagaggattttcatcgactcgttcgtcggtatgcaggaatcgccatggaattgttccatggcgattatccgttttctccggacgctcatcgtccagaccagtttcgctgattctgctccacgattgaagtgtgggcgatccttttgccctctactgatgccgttggaagggagccggcatgccgatatattcattccccgaaccacgctatatttcgggcgcgggctgttcccaatccattgatatgaatatggggttagcaagcgacgcatgtgtggccacacgtgctcgctccacaggtgcgggacggcttgccgggagacccggtccccatggtcggcgaggcctccagaccgctgacacggcttatggaatgagccgttccagctcccgcggggaggtgtttctttatgggctggcgtgacaaccgcaggcgcagcgtatgcaagaaaatcatgttcacaccggaggaatgggagcagactaggagaatccacgagcgttgggcgaggaacatcccggtatacaggcggtggggtgatttcgcccgccagaccctcatgcatggcgcgttgatgaacgtttcggtgacgctggcgagcgatccggaggtgttcaaggccgagccccaccacatcggcgtgaacgtgaaccagacagcccattgcgctggcccgactggtggatcctgctcaccgccaccacgcacccggtctacctgctggcaatagcgccaaagatcagccggttcatcactggcggccagcgatgaatggcaagagcatggaggcatggcggtatctcggcatggcgcaaatgacgaattcttccataacgttcttcaggtccgggccagttgcttatagagcgtatgagcgtctgggtaaatcctgcagggcactccggcgacgttcgcttgacgctccatgatggggtcgtgcttgccatacagcagcagtttgccgggccttatcgcaaaaagcttctcggcgaagagcagatccagttcggattcggcgttcgcgcatcccaatgtgctggtggcgcacatcactccggaaggaacgcagctcaggcatgtgatggtgctgggggaaccgcatctgagattctgcacgattttgacgccgttcaccgccaatgtcgccagatagagctgattaagcagcatgattgcctgctgccattccaggtccatgtccgaagtgacggtgaggtccgagccgacggcacccatataccgcgagtattccgggatgtcgtcgagggccttctccagtcgcgggtatatccgcatgtcactggtgaacagacaaagcacggtatgggaaggattatggacgaatcgcgccttgcgatcccggtacggcaccatgagctccggccattcgtccagatacatctgcggctgaagcatcgggaaaccttgtggattgaactggatgcctttaccgctgagatagtcggcgtagcggtcgatgagctcttcgaatgatgcgatggatcggttcatgccgcccttcccacgttgggaaacttcatgacaaggacgtgcgcccccgggatttcgcatcgcagcaggcacagcacctggcgcaggcgatgctggtgaaactgctgcaccgcctggccttggaaccggggacggcaatcgtcgatcactgcgatttgacggcagccggccagggacgccctgacccgttcccagtccgcctcatcccgaacggcgaatagcaccgagagccagatgccgcgccgcttgccattgatgtcgaacagacagtagggcgttcctgcttccggcatcaggggatcatagggaaccgtctgcgcgacggcgtcggcgggcctgccgtcccagaaagtgccgatgagatcataggtggatttcatgcttgtccctttgcctagagatcgaagacaatgccggtgcccagctcgatagccttgttggcgaactcgacgagcttgcggtagatcgtttcaagccgtgggttgatcggctccgtgagccgccatccaagccatccgagcatgagcttgcactgctcggcgttcaagtagtccacgtctccagggtcgatgagcgaattgcacagcctgtctatcgggccgatgaagtccttatcgaggagatcctcgtccccctcggttagttcgaatgattccgtctgccccggcttcgcttggaaggtttcgggaatatagccgtagtagttgagaccttcaaggctgagaacaaggacaagttccatgatcacatttcccttctcttgagaattttgaagtgggtttctttgttgcttccaggcagaccgttgagcttgacgtttttcttcgttcttttgtcgtatatgcgcagatagcccgccaccatgtccgcgtcgattctccaccgggcgttttcgaacacgtacttgacgccccttctgcgcccctgggcaccgggagtgaaccggctgacaatgtcattgagatcgaccggctgcctcttccaactttcgttccacctcgtctcgcggtctttgcttctgtcgtagcggccctgatccaccatggagccggggacgtcgttgccgatgtagctgcgcgagctgtccgaataccgctgcttgctgtccgacatatgccatatgtcctttcctgcggcgccttgccgcatgccatcttgaagatgcgccagcattgtgagaatgcggcgcgcttcacctgtttgtatgagtgggtgggtccagacggtggcacaatgggatgtgcgagatagtccattgtgggccgtctggaccacggtgcgagaacttgccggttcgcgcaccgtttttttttattgcagaatctgtgccgggtcggcctgcttctcatccctcctttccaagaggagtccgcgtgcgtagagttcgaggatgctggcgtcgagcgcttcgtcatcatggcgatggcgcagccagttcgcatgctggttcaggatgttagaagcgcattccagcgaggtgccgaatcgctgagagatttcctcgatggtcgtgagaccgagttcttcgatgagtacttggggcgcgatagcgtatttcgcccagaaattcgcttcgatttcggcaagctcgctgtctcggagatggcctcgcatggtgtgtcccatttcatgcaatttggtaaaacgaattcttcctgagttttcttggagattgcaggcaatgtatcggctgtcattgccgtttgcgctaatcgtgaatgatatgccacttgggcagctgcagagcgtcatcaagtcatccaaggagacagatgggttgaatgcaatctgatagggtatcgtttgaattccgtgtgcatccagcaactctgatgggtcgatgggcagcctgatgtagccgagttgctggaatgcgtccaccacgctccatttcaactcctgataaaacgacgggtcgtcaatcctatatcccgtgatgtcctccttgttcccttgcagtcaacagagtcatgatgagctcccgcgtctccgcttcgctgagatcgccgccgtgcctggcgcagtacgccttgatcgtgccgaacggcgtatcggcgtttgattcgggcaggcccagcagaaattccgatgtggtgtgcagagcggtggctatgttcgcgagcgtactcgacgtgggctcccgctctcccgcaaggtatttcgagatattcggctgggttgtcccggctcgcgcggcgagctgggactgattgatgccatgctgccgcataagcttgcgcatcctgtcgccaagtgccgccgtcatatgatgtcctttgtctttaagcctgcgaggctccttttcaattgcttcacggcaatcaatataccacgattattccaaaaggaataatcgtggtgcaacaactaatgtgctgcaagtaggaaaacgcaagataagtcgttcccaaattgttgtcaccatgttgtcatacaaggctgcaatcaggtaaataaagccgctaaatcactggtatttagcggcttctcagcatcggtcaaggcgggttcgactcccgtcatccgcgccaccactttccgctcccgctggcgggagctggctcacgtcagcgagactgagggtggttttccacctatcagatagctacacgtgccagctccagcagggggctcagttgcccgcgtcccccgtatctcccgcgtcgccggccatcttaatcagctgctcgatggtgacgaactcgtacccctgcttcttgagatcgtcgatgatgccgggaagcgcctcgacgtcctgcgaacggtcgccgccgccgtcgtgcatcagcacgatcgccccgttatgcgcgcccgtcatcacggcatcatgaatcgccttggctccgggacgcttccaatcgagcgtatcgatatcccacagcacgttcatgtcgatcaggtcggacgtctcctgccactgcttcttgccgaacgccccgtatggcgcccttagcactttcgttacatgcccggacgccttcttcatgttcgaaaacccggcgatgatttcagcgcgcaacgcgtcgcggctgagtgtcggcatgtccggatgcgtgttggaatggctcgccacctgatgtccctcctccagcatgcgtttctcggcgtccgggaacgacaggcactcctcgcccacgtcgaagaacgtggccttgacgcccttctccttgaggatgtccaggatcgggccgctgtatttgctcggcccgtcgtcgaacgtcagcgcgatgaccttcttcccctccggacgcgggttcaacggcacgacgatcgtgtcctgcggctcgacggtgacgcctttgtccacatgcttgccggaacgtttcccgacccagtattcgtgcacgccgtctttcccggcctgcttgagtatctgtatcgagccgcctgcgatgttgatgctttcgccgtgcggcacggtctccttgctcacggtatggtcttcggtcacatcctcgcctgacgtcaccatcaccatgccatcctgcgggatcgtcgtgctgtcgattgcatcccggcgcacggcagcgccgttgatgctgacgacgatcggtttgccggcatgcttctcgatcatgtcgccggccacgtcgaccagattgcccggatgcgcgtcgaagtcgccattgtcgcgcagcagtcgtcccaacgtcatgtcgacgctgactttcatggaagtgccgtttaccgtgatcggtatctgccgccaatgccggtcccacatccaccagccaccggcactgccaccggccaacgccaatatcaccagaatggcgacgaatgcaatcagccgatgccgtcccctgccgcgccgaccgttatcggggccggctccgtactcgccatattcgttcccgcgcgtcttccccgcccggctcacactgtccccaaacgacagctcttcaatgtactgcggttcttttgtcacgtctttattttacggaggtgaagatgggggaaaggtgaggaacgggccgtggcgtgcggaggcgatggattccgcccggcggctccggccggagtagcggtggtgccaaatgttgcatggtcgcgggataatgcaggtatgacgattgcaactgccgaacgatacgctgaaatgctggacgctgcgcgccgcggcggatatgcctacccggcgatcaatgtgacgagctcccaaacgctgaacgctgcgctgcagggttttgccgatgccgagtcggatggcatcatccaggtttcagtgggcggcgccgcgtatttttccggtcagggcgtgaacgaccgcgtgaccgggtcgttggcgttcgcggcgttcgcgcatgaggtggcgaagcgctacccgcatatcaccgtcgcgttgcacacagaccattgcgccaagcagtatctggacggttgggtgcgtcccctgctggacatggaggccgatgaggtggcgcacggccgcgagccgatgttccagtcccacatgtgggacggttcgacggttccgctggacgaaaacctcgccatcgccgaacagctgctcgacaagtccgtcgccgcgcgcacgatcctggaaatcgaaatcggcgcggtcggcggcgaagaggacggtcatagcgccgaaatcaacgaaaaactgtattccacgccggccgatggcgtgaaggtcgcccagcgtctcggcctgggagagcgcggccggtacatggccgcgttcacgttcggcaacgttcacggcagctacaagcccggcgtggtcaagttgcgcccggaactgttgggcgacatccagcgcgaggcggctcaggccgtggcggacgggcgtatcgcgtccgccgccggggccgtcaattttccgaacggcaagccgttcgctctggtgttccacggcggttcgggctctcgcccggaagagatcgccgaggcggtgcggtacggcgtcgtcaagatgaacatcgatacggacacgcagtacgcgttcacccgtgcgatcgccgatcatgtgttctcgaactacgatgccgtgctcaaggtggacggcgaggtcggcgagaagaagctgtacgatccgcgctcctggggccgcgaggccgagagcgcgatggcggcccgcgtcgtggaggcctgcaagcagctcggttccgccggcaaagccctgaagtgacgtcggtcgccgcggtagatgcaactgcagctgtcgagttacggtcttccgatatgatggctgaatattgaaaaaatgcgtcggcgcgggatttcccacgcaagtgcagggagagactgcaggaacttcaacaaggcaaggacggcaagttgcagccgttcgcgcccatgttgatatgggcgttggaaaaacgaatgcgacggtaaccgcacccgccccagcgcttaccttcgcagtagagggcatacggtaggctgttcccggcggaatcgtgcggatgcggaggtgcagtatgtccggaatcgtgttgatcggcgctcagtggggcgacgaaggcaaaggcaaggctaccgatctgatcggtaccaaagtggactatgtggcccgtttcaacggcggcaacaatgccggccacagcgtgatggtcggcgaccagatgtatgcgttgcacctgctgccttccggcatcatcagcccgaacgtcacccccgtgatcggcaacggcgtcgtcgtggatccggaagtgctgttcgaggagattgacggtcttgaaagccgcggcgtggactgctcccgcctgctggtgagtgaggctgcacatgtcatcgcgccttaccatcgcacgctcgacaaggtgaccgagcgtttcctcggcaagcataagatcggcaccaccggccgcggtatcggcccggcctacgccgacaagatcaaccgcgtcggcatccgcgtgcacgacctgttcaacgccgagcacctgcatgacaaggtcgaagccagtctgcaccagaagaaccagattctggtcaagctgtacaaccgtcgcgccatcgacgtggaccagaccactgacgagctgctcaagctcggcgaacgcctcaagccgtacgtcgccaacaccggcctgattctgaacaaggctctcgacgagggcaagaccgtgctgttcgaaggcgcccaggccacgatgcttgacgtggatcatggcacttacccgttcgtcacttcctccaatccaaccgccggcggcgcctgcaccggcaccggcgtcggccccaccaagatcactcgcgtggtcggcgtctccaaggcgtacgtgacccgagtcggcgagggcccgttccccaccgagctgttcgacgaatccgccgaatggcttcgccagcagggccacgagttcggcgtgaccaccggccgtccgcgccgctgcggctggttcgatgcggtcgtgaaccgctacgccagccaggtcaacggtctgaccgacctcgtgctcaccaagctcgacgtgctcaccggtctcaaggagattccgatctgcgtcgcctacgacgtggatggcgagcgttacgacgatatgccgacggatcaggccgccttctctgctgccaagccgatttacgagaccatgcccggctggaccgaggacatttcgcaggtccacgagttcgacgagctgcccgccgcctgccaggcgtacgtcaagcgtcttgaagatctgagtaactgccgcatctccgtgatcggcaccggccctcagcgcgaccacatcatttccgtccactcgcttctcgactagtcgccattcggcgtcctcgccgacccacggctgccgggacaaagtgaatccgcgtactacaagggtttcagatcatgaatcagtctgtaccgttcgtgccctcctcgcatgacgaatccgatggcggcgacgccgccggcgcgggggacatcgaatccgtctctgccgggtccgacgtcgccgacacttccgcgccggactcgactccaagcgaggctcacgccctcgccgcggacgagccggcgccatcgacccaagagatcagcgcctccgaaatcgaatactcggcgcctcggcccaccggactggcagccgcagtagcaccaccttccattccactggccccggccaagcgcgtgcaggcgaaattcaatcccctcgccgatggcatgctgtatttggtggtgttcgtcggcgggttcttcggcacggcgatacgatacgggctctcgctgctcctgccgaatccggccgcgccaagtggtctccttcattcgttccacaccgccacgttcatagcgaacatgctggcgtgcttcatcttcgccgccctgagcacgtacatgtcgcaggcggcgtggattcgcaagcgcatccgccagctggtcagccgcggtgtcggcatgggcatgtgcggcgggttctccacgttgtcggcgatgatgatcgaggacctgaactcgttgcgcgccgagaacatcgtgggattcgtgacctacacgctgctgagcttcatctgcggtttgatcatcgcgtggcttggcaccatgctgggccttgcgctgagccgaaaacgcgaggcgcgcgtggtggctcgcgcggtgcgcgagtcgcaggccgccggcgctccgtccggagcagacttggctgttgaaagtcaggccggttcggaaccggctgcgggccgcgtacaagacatgccagtatccgacgaacagcaccttccgtcgttcgaaccggatccgatcaccgcggaaattccgctcaggcctgatcctgaaaccggggaggtgcgctgacatgtttgccctgatctgtatgtgcggcggcttgggcgccgtgacgcggttcgtcctgaacacctcgattcaacggtggtggaaccgcgcgttcccgctgtccacgttcatcatcaacgtgctcgccacgttcttcgccggcgtggccgccgcggcctacttctaccagacggccgaccattcgtcgtacctgctgttcgtcaccggcttcctaggcggtttctctacgttttccacggctatcaacgagatggtgtcgctcgcccgcagcggcaaatacgccgcggccgccgtgtacttcatgatgaccgtgctggtgccggtggtgtgtgtggtgctgggttgggggctgatcgcgctggtgcggtagctcgtctgcgctggagtggctctcaaaactcgcagatacaaaaacgatgttgttggaaaatagggggttctgtttttgtatctgcaagttttgagagcgtcgttctgtatacaattaggcgaacagtcatattgtgacggcaaacgatggagtgggggcatggtcgggatgcgtgatgtggccaaaaaggccggggtgtcgttgagtacggtgtcgctggtggtgaatggtgccgggtgcgtgtccgatgacatgcgcgagcgcgtcgccgaagccatgcgtgcgctcaattatgtgccgaacgagctcgcccgcaacctgtatcatgaccgcaccaacaccgtcggcgtcatcgtgcccaccatccgccatccgttcttcgccacgttggcggccggtctgcagcgagagctgtcggagcgggggctgcgtaccatgctgtgctcgacggccgattcgggtactggcgaggccgagtacgtcgacatgctccgccggcatatgatggatggcatcgtgatggcggcgcacaccgagcacgctccggattactggacttcgatcggtcggcccatcgtggggttcgactgttatctcggcgagggcatcccatcggtcggctccgatcacgagcagggcgggcgactgatcgccgacctgttgattcataatggttcccggcatgtggcgatggtaggcggcccgtgcaggcagttccatgatctggcgcagacgccgactggcgaggtgcggcagacggaatcgcccgggaacaccacgttcccgaccgtgcgctattacctgacgctggagcgtgaactgcagcgtgcaggcattcggtgcgagtacatcgaggccggggaagtggcggattttcagggttgtgcgacggccatgcgcgaactgttcgaccgttttaccgacgtggatgccgtagtcagttccgatatcggtgccgcctgctgcgtgcaggaggtgtttcgccgcggcatgcgtgtgccgcaggacgtgcaggtcgtcgcctatgatggcacgtatctgaccgacatggcagggttgcgtctgaccgccgtatgccaggacttcgatgcgcttgccggcacggccgtcgcccgcatgatggatgccatcgaggggcgcccggtcgattccgccggtgacgtaatccctgtttccctgcgcgaggccgacaccactcggcgctgatcgccgcgcctccgccagcgagtccggaggcggtacctacgccaaccgcttcggcgacggcaccatcgcctcgctcaccgatgtgctgcgcacccgcttcgccggggtgtacgacggtgtccacgtcctgccgttcttcacgccgttcgacggcgccgccgccggctttgatccgatcgaccacaccaaggtggacccgcgcctgggctcctgggatgacgtggccgaactcagcaagtcccacgacatcatcgtcgacgcgattgtcaaccacatgagctgggaatccgcgcagttccaggacgtgctgaagaacggcgagaaatccgagtactacccgatgttcctgaccatgagctccgtattcccgaacggcgccaccgaagaagacctcgccggcatctgccgcccgcgcggcgaatctcgcaagttccgcactcccaaaagtctcacgcgacgcggccggcatatcggccgtgccgcgtcatcgtgtaatatgcgaccgttacgatagttgtatacccgtaacgagagcgcacaagagaagagaagtaaaccgatatcatgaccgatgatcagcagcaaccgaacgaattccccgctccgaagccgttgccgggcagcgtgtacattcgccccggcatcgatgatcggcctgattacgacaaggtgctcagccccgaagacaagtccgcggtcgcccgcttggccgtgcatcagccgcggcgcaaggtcgaggcgtccgtgacgcaagccgagacccaggtcgcgcagatgacttcggagggatctcccgcggcggccgcggcctccgtcgacacggcggtcccggacatgggctcggcgtacgtggacatgcgcgacccggtggtcagcgccgacggccagcgcccgaaccccggtcaggtgacccgcctgtcgtggggcttcgcggtgggcgcgaccatgtcgatcgtgccatgggccgcattgaacctgctcgcgctgcctgcggtcatagcgaaagtcagctggcagcgggtctccagcgcggttgcctcccgcgcggcgttctccggtggcggccaggaactctccgagagcctggtcagtcgcattggcgcggtcggcgacggcggggtggcgtcggcatgggccattgatctggccgtggttgttgtcgtgggcgtcgtcgtgtcgctgattgccgaggccgtcgtctccgcgctgtccgatcgcacgcgcgtggccgctggccggcgcacgccgtggatcatcgcgggaggcgtcgtctccgcggtgatgacgctggcgctgggactgtgctcgaacgtggtgggcatcgcgttgctgtggggtctggtgcaggtcggttatgtgatgctgaccgtgccgatggcggccgcgttcagcgagcgagtgcccgacaagttccgtccgcgcatcgtgcgcgcgcgtggcatcggccagatggtcggccaggcgctgggcgtgtggatcggcgtcgcctgcgtcgtgttcggcgggctgtatacgccgttcgtcacggccgccgcggtgttcctgctggccggcatcgtgccggtgctggtgtggccgaaggaaccgtcgagcgaggagcagccgcatacggcgatgagtgcgcacatgctgatggagcggttccgcgcgccgcggcacgccgtcgaattctggaaggcgttcgcttcgcgctccttggtgtcggctggtgtcggactgacgaccatgttcctgtggttcatcgcatcggcgctgatcttccgggattggttcacgcaaggcaactcctctccgatcgcggtaccggtgtgctcgttgatcgcctcgatggccttggcgacgctcgtcggctccgtgggtgccgcgttcatcgccggtccggtgggtgagtacattgaggatccgcggtatctgtcggtcatttcctgcgtgctgtacacggtggcgttggctttgcccatgaccatgccgagcgccgtcagcatggtgctgttcgccctgatcggagggttcgcgttcggcctgatcgatacgttcggccagttgcttgcgatgggcgcgttgccggatgcgcgttcggccggccatgatttggcgttcttcaacctgtcgaattccgtcggtctggcgctcgccgcgataatcggcgcggtcggtgtggccgtcaccggcggtttctcggtgctgttcccggcggccatcgtctgtgtgctcgcgtccgcggtcgtcacgatttcgatgaagcgctagcaatccggccggattggccgctgttgcgcctcgtttgggattgaggcatcatcctatccgcgattagtcccatccgttgctgctgaaatgggactttcgcgggatggggcgtcgatgtgtctgtctgtaatgcaggcggaacgcagacaggttgtgccgacgccgccgatgttgttatgccgcggccgtccacatagtgaacctttgatggctgtcgtggaatcccgcgcctatgttgtcagacagtcgagcgcgaaagagctcgaaagacacgttcaataccgaaaggaggttcgccgcgatgactggatatgctgctgataacgccgctaacgcaaccaccgttaacgttgttctgctgtctgcacgaattattattccgtcttcgctggcggactgattcggcatcactgcttggaaccccgccaacgaaggcagggctcagcgagcaaccaatcgtatagccctgcacgagtcgcggggcttttttgatgcgtcccacaaggtcaccggatcagcaaagcggcaaatgagagagaacagaataaaaaatcgcgggctcgtccgcgtgcagtaacaggagctaacaatgacagcagtcacactgacagctgacggcaccacttcggtgggtggaaaagcaaaggcgatggtccgtgactcggtcaagaccgtgatcgccgcctcgatggtcggaaccgccatcgaattctacgacttctacgcctacggcaccgccgcagcgaactacttcccgcacatcttcttctccgcgaaggacaaccccaccgtcgcgctgctgatgagcctgctgaccttcgccatcgcgttcatcgctcgtccgctgggatccctgatcttcggccacttcggtgaccgcatgggccgcaagaccacgctggtcgtctcgctgatgaccatgggcgtcggcacgttcctcatcggctgcctgccgacctacagtcaggtcggtgtcggcgcggtcgcggtactgtgtctgctgcgtttcatccagggcatcggccttggcggcgaatggtccggtgctgcgctggtcgccaccgagaacgcgcccgaagacaagcgtgcgctgtacggctccttcccggagctcggcgccccgatcggcttcttcctgtcgaacggcacctacttcgtgctggagtcgttcaatgacaccgatgcgatgtgcgcctggggttggcgtgtgccgttcctgctgtccgccgtgctggtgatcatcggcctcgtcgtgcgagtccacatggaggagaccccgatcttccgcatggcccaggagcagaagaaagtcgtcaagtccccgctgaccgaggtgttccgcaagtcctggaagcaggtgctgcaggcgacgttcctcgtggccgtgacctacacgctgttctacacgctcgccacctggtcgctcgcatggggcaccaagatcaagcgtgaaggcggcggcgacctcggcttcaccaaccaggagtacctgctcatgctgatgatctccatctgcgtgttcgcgctgttcatcgtgctttcctgcctgtatgccgaccggatcggccgtcgtcgcgtgctgatgttctcgtcctgcgcgctggtcgtgttcgccgtgctgttcccgttcctgctggacagcggcctggtcggtcagaagaacttcgcggccaccatggtgttcctgtgcctcggcttcgccctgatgggcatcgccttcggcccgatcggcgccttcctgcccgagctgttcgacgcgaacgtgcgttactccggctccggcatcggctacaacctcgccgccatcgtcggcgctgctttcgtgccgaccatcgccacgtggctgtcgaagaacttcggcgtgcattcggtgggtctgtatcttgccgtgatggccgtctgctgcctgattgcgttggcgacctgcaaggagaccaaggacgtcgactttacgaagtgacggcgatggtcgggtaccgcccggccgcgtttgaactcccaaaaaacaacaacaataaacaaaaacaatcattcaatatttggacgtgggcaaccacgtcgcctccagtggtactagaaatgagccacaggaggggatgactttggcgcgggacacaatcccgcgtggaagccgtctgcaaccaagagggccgtcgaaagcgagcgcgttcggcggcaagacatccaattaaaggagtgcctattatggcagcaactatctggtatgagaaggacgccgatctgtccgtgttcgatggcaagaaggtcgccatcctcggttatggctcccagggccacgcgcatgcgctgaacctgcgcgactccggcgttgacgtggtcgtcggcctgcgcccgacctccaagtccgtcgagttcgccaaggagcagggccttgaggtcaagccggtcggcgaggccgtcgccgaggccgacgtggtcatgatcctgctgcccgatcagtaccaggccgccgtgtacaagaaggacgtcgagccgaacctgaagccgggcgctgccttggccttcgcccacggcttcaacatccactacggctacatcaagccttccgaggatcacccggtgttcatggtcgctccgaagggcccgggccacattgtgcgtcgtgagtacgccgccggccgtggcgtcccggtcgtcgtggccgtcgagcaggacccggacggcaagacctggccgctgtgcctggcttacgccaaggctctgggcgccctgcgcgccggcgccatcaagacgaccttcaccgaggagaccgagaccgatctgttcggcgagcaggacgtcctcatgggcggcatcaaccacctgtgcgacctcggcttcgacgtgctgaccgaggccggctaccagccggagattgcctacttcgaggtgttccacgagctgaagatgctggtcgacctggccaacgagggtggtctgaacaaggcccgttggtcctgctccgacaccgcccagtacggcgactacacctccaccgtcatcaccgacgagaccaagaagcgcatgcagtaccagctcaagcgcatccaggacggctccttcgccaaggagttcatggatgaccaggctgccggcgccccgaagttcaaggaactgcaggagaagttctcccacccgcaccttgagaccgtcggtccgaagctgcgcgccatgttctcctggaacaacggcccggccaaggaccaggacgaagccgagtccttcaacggcaagatcgctcgtacccaggttcagtgatcgcctccgctccggctcccgctggcgggagctaccagtcggtcgcagactgactgagagcggtgcataacaaggccgccgttcccgttcattcgggagcggcggccttctgcgttgccggtgatgcggccggtaacgaagccgacattgccgcgtcctgcgccgcgtcacccgctccccgcctgaactgttcatactccaatagtgagatggttcacgttgtggacggtgagggggctgtggcggcgttaccggtaggatagtcctcagttctaaggacaaaatccttaacgcttggatcgaccgggcccatgcccgaccccaaacgcgcggaatgcaggctcctgcataatgcgcaaccacaaacgacaccgtgtgccggcaagagtgccggtacgcaagtaaaggagtgccaaacatggctgcacaaatctggtatgacaacgacggtgacctctccgtactcgaaggcaagaaggtcgcgatcatcggttacggctcgcagggccacgcgcatgcgctgaacctgcgcgattcgggtgttgacgtggtcgtcggcctgcgcccgacctccaagtcggtcgccttcgctaaggagcagggccttgaagtcaagtccgtgccggaagccgccgccgaggccgacgtaatcatgattctggcccccgaccagtaccagcgcacgatctgggccaacgacatcgagcccaacatcaagccgggcacggccgtcgccttcgcccacggcttcaacatccactacggctacatcaagccttccgaggatcacccggtgttcatggtcgctccgaagggcccgggccacatcgtgcgtcgtgagtacgccgccggccgtggcgtcccggtcgtcgtggccgttgagcaggatccacgtggcgacgcttgggacatcaccctggcttacgccaaggctctgggcgctctgcgtgcaggcgccatcaagaccaccttcaccgaggagaccgagaccgatctgttcggcgagcagaatgtgctcatgggcggcgtgaacaagctcgtcgagatgggcttcgaagtcctcaccgacgccggttaccagcctgaaatcgcctacttcgaggtctgccacgagctgaagatgctcgtcgacctcatgaacgaaggcggtctgaacaaggcccgctggtcctgctccgacaccgcccagtacggcgactacaccaacacctgcatcgacgagcacgtgcgtgagcgcatgcagtaccacctcaagcgcatccaggacggctccttcgccaaggagttcatcgacgaccaggacgccggcgctccgaagttcaaggcgctgcaggaggagtactccaacgtgcgcatcgagaccgtcggcccgaagctgcgcgccatgttctcttggaacaaggacgccgtgaaggacgccgacgaggccaactccttcaccggcaagatcgcccgcgcccaggtgcagtgatttctgaggctgtgaggccgtaagaccgtagagctgtaaagccaggccttaccgcatgactcaggtcgttgttttcgtcgttcatcgccgaagacaacgacctttcgtttatctggtcctattaatgtgttcgtaagcaatgtgcttacgaacacattacgagtatcaagggttgctatcacgccaaattgcgtcactgtgtgcgccctcgcacacagtgacgcctgtgtaaaccctttatttttcaacggttctgcagattgcgtcactgagagaggtcgcgcacagtgacgcaatccgcacacagtgacggtcgataaccatggttgtgtcgcacgattcgcatgtttcgtatgatcacgtgcgagttgcaggattcgacgctggtggcatcagcgccgaggctcgttcgctgtcgtcttccgcgatgcccgactcatacgcggcgccctttgcggcgttctctggcgcggtacctacgttgccgctgacgggccgtctcagcacgatcatctgccagcagtgcccggaatttcgggtgtggtctattccggcaggtggtgtcaagggctttcgccaccctttgcgcgaatcgtcgccgcccctgcgaggtcaatatatcatcggcaaagacgacgatgactgtatatcccatcgcccgcaaagcctgcctcttgcgttcatcccatcggtattgtcgtttgtcgcggcgatgcgcgtctccatcgtattcgatgatgacccgttgtttggggtatgcgatatcgactgttgcctcgtgagccaactccggaatgagtatcttccagtgtttgaccggctgcggcaatccatgtcgcaacatcacgagagtgcagcggcattccatggtggagtcagtcacggcatcgaggaaaacgagagcatcaatgcatttccttctgctcgggaacgcgtctgctccatcaaggaaccgcgagatattggcgaccgtcatggagcctgatgacgcgcgcagtatggcatccgccagaacgattacctcgatctgcgtgagatacggcgccagcagtgcccatgtcatcagcgggtgcgtgtagacgatggtgatgttgtcgtgagtccatgtgaggtgggcgatgcccgtcaacgatggcgggcatttcaggtaggacgtatctttccgtccggatctcttggttggctccccaatgtacagtacttggaacttcatggcttcaaatcttgaacatagtggtgtctctatgcctgccagacgtaatgcggtcataccggtatagaccggtggcgaggtgttgatggtttttcgtgagtgttccatgcaatgcaggaacgtcgtggattgcagctggcgcagtgagcgcgcaagatagttgttcgcgactgttgcgctggagttgacaggggtgtgctgattcgtattcatggattgaatgtaagcatgataatctgcggtgcgccaccggccgcctcaaatctgtggataagtgtataactcatcggttatccacagtgatgtagcgaatgtggatatgtaactggcggagatgctgcgtgtggtgctgctctgcggatggaggaacgcgtcactgtgcgcggggtgcgtcactctgtgcgtcctcacacacagtgacgcccatgtaaatcccttatttttcaacggttctgcgagttgcgccactgagagagggcgcacacggtgacgcaacccgcacacagtgacggtattgcgggcttccgccgtgcacgggtacgggtatcggatcatgtgactgatccgatacccgtacccaacgcctcagagcgcctgcgggcgcaggacgagatcgaaatcgaactccgcgtcgtcgaggcggtatttctcgtgcagcttgggaccgcagctgttggacccgacgccggactgcatgtaatccacgcacaccaccgtcgaatccgccggcttcagctcgctgttgtgagccttggcggtcagctcctcctgggtgtaaggcagcgcctggaagtcgaaggcgtggtcaccggcacggagcaccagcagctcggtgtcatcgctggcgacgctcgcccaatcgcagtcgtgatggttgccgttctcctgcggcttgatatacggctcgaacagcgattcgggagtgccggagaacacgccatgatagctggaccggcgcttgtcgatgtagctttcgttcgggccgagaccgcaataggcgatctgccgcatcggcttcggcacgaacaggcgcaggccgaaacgcggcaggaacgggaaatcggtgtcgcgcatcacatgcatgcgcagcgccaccgaaccgtcgggcgcgatggtccagtcggcgtcgatgtcggcgatgcgctgcacaatcggcgccaccagcgccatcgtcgcatggatcgtcacctggccgtcgaccaccaccgagccgtcctcggacgtcgctatggcgctcacgtcgccggcgtcgacgttgccgtcgtcgaggatcgcatcgtctccaaacgaggcgaccggcgcatcctcatcgtccgcacgcagctcaatcgactcgggcttggcgatgacgtcatcctcatcgaccagtacaccgacctcgtacgcgcgcgcctgagcgcggtcatactgggcgcggatccaatcggccttgatgtactggtcgttgtcggtgggagcgcgccacacgttcagctccatcggcctgttaagcagcgaccggttcgcgaacgacatcgacgagaacaggccggtacggcggtcgagcacataccggaacgtcgagccttccacggtgatcgaggcatcggtctgcatgacggtcagcgggtctgccagcacgtcgtcgtcgtagccggcatccgcggcatcgttcgccccatcgtcggcgccttctacgctatcggtgccgtcatcggcaacgtcgtcgacatcgtcatccgagccgatgccatcggcgatatcggccagcgcggcgacgaccgtctgattgcgcggatccgcggtcggcacggcgacctcgtcgaagccgagctcgaagccgatcggcagtgtctcggtgtcagtcgcctgatagtacttcaccagcatcgtcacgttcccggcctcgggtatggcatcaaggatctcagccggtatgtcgacgaccgcgtcaccatgcggcgcgatcgatggcatcgacggcgtgtaattgccgggatgctcctcccggaacgccgcgcccgccgcagggtcgctctcccacgcagcccatgcggtctccacgccatccaccagcagctcgaacgtcatgaacaccgcgtcggcggcatccaggaagtccaggtaattgtgcagcgtcaccgtgcccgcggccgcgtcgaaaccggtcacgcgcaccggccgatacacgttcttgaactccagcagcccggtatgcggcgtgcggtccgggtacaccaagccgtccatgcagaaattgccgaaatgcgggtactcgcccgaatcgccgccgtacgcgtactcgcgcttgccggccgcgttcgtgccacggtcgatcgcatggtcgcaccactcccagatgaagccgccggccaggccgtcataacgctggatgcgcgtgaaataatcctccagatcgcccgggccgttgcccatcgcatggcagaattcgcacagcacgtacggcttgacgccgttgtcgccgtcatcgccgttgctgccgtcgcgcagcccgtccggcgtgcgcggcccctcctcggagaagtactggtcgatctcctcgacggacgggtacatgcggctgtgtacgtcaagatagctgtaatcgcactcctgtccctcatccacataccgggcgctctcatagtgcgtcaggcggctcggatcgaaggtctgcgtccacagcagcgccgcctcgaacgtacagccgtacgcacactcgttgcccatcgaccagaagatgatgctcgcatggttcttgtcgcgctccacgttgcgctgcgcgcggtcaacggtcggcgcgatccacgcggggttgtcggcgataggccggttccagcgcttgttgacagccgcgtcgctctcgtccggatgcacgccgcgcatcgcgccgtggctctcgttgtcagcctcggccaccacgtagaagccgagacggtcgtacaggtcgtagaagtgcggcgcgttcgggtaatggctggtgcggatcgcgttgacgttgtgctccttcatcagcgtgaggtcgcgcatgagctgctcctcgctgatgaccgggccggtcaccgggtcgctgtcgtgccggttgacgccgtggagcttgatcggcttgccgttgaccttgaccacattgccatccacgctgacctcgcggatgccgacgagcgcggtgatgacctcgttcgcggtggtgtacacgatggtgtacaggtacggcgtctcggcggtccacagatgcgggtcgtcgaccgccagggatgcgtgcgcggtcggggcgaacgcgctgtctccggtgaatccggtgccgttcgcgccgccggcgagcgtgccggtcaccgacgcgatgcgcagtgcggcctgtgcgtccgtggagtcatcgtcgatggcggccacgtcgtcggtcgactcgatgacgccttcttcttcgtcgtccgcggcggtgtcgtcgctgccagtgccggtcgcgtcgtcggcttcgctcgcgtcgggctgtgtccgaaccgtcacgtcgtcctcgtccccggccatcggatcatcgatcggctccgaggccgtctctgccaccagctcgccatcctcatcgaacagctgcaccttgaccggcacatccgcatcgtcgaagaacgcgaaatccacgtcgaccgtcgcgtgatcgaccggcgacgcatcatattcgtcatcgctgatgccggcctcaaccagcgcggaatcgacattgcgccaaatcgacgtatgcacgaacatgtcacgaatcgcatactcgggacggtccagcagatacacgtcacggaagatgccgctcatgcggaacttgtcctgatcctcctgatagctgccgtcgcaccacttcagcaccagcacggccagcgtgttcacgccgtcctccagcacgtcggtcacatcgaactcgctggtcgaatgcgacacctgcgaatacccgacgaactcgccgttcacccacgcatagaacgccgaatccacgccctcgaaattcaggtatgtgcagggcgcgtcaggatcggacgtatgcatgaaatcgcacaggtacacgccgcacgggttgtcctgcggcacgaacggcgggtcgaacgggaacggatagtcgaaattcgtgtactggtggcggtcgaaaccatggttctgccacacgctcggcaccggcgtcgtcgtgaagccgtccgccgccagcgcacccgtggcggcagtgcgcggatcggcgttctccggtgcgtcatccccgccgaaatccacgtcatagaacaccgggcggccggcggcgcgcagtcgggagacctcggcgtccaagtcgtagatgctcgcataatacttgaaatcccagtcgccgttcagcagcatgaaacgatcggaattcacgcgattctcgccgaccgtgtccatcggcgtggacgcgggcacgtaatacgcgcggttcggctgcgtgccgacatgtagatggccgagactctcgtagtaccggggaatgaacatgatggagccctccttggttgtgcatgtgccagtgcgatgacactgcacaccattatcggcgtcagcatggtcgagaagtaaggcctttgcctggcttccggcgatattcgcgggtcctggaaaggtggtctcgcgctaaaccaaggaaaatggcggctcgcaaggtttgtggggacttcgttgtgacttgtgttcggcgtgtcggattatggtgggctggctctgtgcgctcgtgagccgttccggctctgttcgcgcgtgcggcggccatggctccatccgcgggatgtgcgcgactaagggcggacggtcttgcgcgtctgcgtgacctggtatgcggtcagcagaatcgcaagccacaccacaccggcgatgacggcgacgcgatagctggacgagaagcacatgagcaccacgacgaatgccaggaatgcgagcactacatacggcatcacgcgggcgaacggcagcttgaaatggatgcgtcccagagcctcgtctccggtgagcccggccagctcgccgggcccgtctccggccgccacacggcgacggaaatgaatctcggtgaccatgatcatcgaccagttgataacgccagcaatcgtggcgatcgacatcagataattgaacgcgaaatcgggccacaggaacacgaccaccacggccagcgcggtgatggccgcggaagcgagcaccccgacaaccggtacgccgtggaagttgagcttgccgaggatttcgggcgcgttgccctgcctggccagcgagtacaacatgcgggagttggcgtacaggccggagttgtacacgctcatcaccgcggtcagacacacgaagttgaggatgccggcggccgcgtgcacacccaccgagtcgaagatctgcacgaacgggctggtcgtgccgtcgatcgtgttccatggcaccacggccatgatcacgccgagcgcgccgatgtaaaacaccaggatgcgccagatgatgccattcgtcgcgcggggaatggttctgcgtggatcttcggtctcgccggccgtgatgccgatgagctcggtgccgccgaaactgaacatcaccacgaccaacgccatcaacagtccggtccattggccgtcggcactttgctgcagcaggccgtgggggagtacgccgccatcgagcgcgaaccagttcgagaagctcgccttgacgccggaatccgttggcagtccggcaatcagtaccgcgagcccgccgacgatcatcgctatcaccgcgacgatcttgatgatcgcgaaccagaattcgaactcgccgaacttgctcacccccagcaggttcatcgccgcaatcacgacgagaaacaccgcggccgacacccattgcggaatcgcgggaaaccagtagttgacgaacgagccgaccacgctcagctccaccatcgacaccagaatgtaattgaaccagtagttccagccgctcacgaagccggcgcgcttcgaccagtagcgggtcgcgtagtagctgaacgcaccggccctcgggtcttcgaccgacatctcgcccagcgcccgcacgatcatgaagatagccaacccgcccacaagataggcaagcaggattgacgggcctgccagcgcgatcgactcgctggagccatagaagagtccggtgccgatcgcccctcccagcgcgatcagctggacatgccggttcttcaacgatttgcgcaacgccgccggtgccggcgtgttgccggtgccggggcgggaggccgtcgccgtgctgtcgtgcatggtgttcttgctcatcggttcctctccatcgttgccgcacgccggcgactgctcgcggcattggccgtctgcccgtcgttgacccgctcgcgcccgtcttcgacattgccgtcatcgccggtgggaccgggccgtgatgccgtgatcgccgcacccgccgcaacgcaggccgatatcggtacgaccgccattctatgccatccgctgacgagtcgacgtcaccgtgcgccgttttgtctcccgcatcggctcatcggggtgcgtcatgccgcggtgggcaccacggtcacggtctgagccttcctcatcgtcgcggcgtcgacttttcgtggctatctgcgtttcaagggggtgatttcgtgttcgccgaacatctatctgagtttcagggggttgccaaaacatgatacccggagtattgagcaccaattgccattggaatcatgcggtcttgagggcgtttatactcggctaccaacccctcgaaacgcagatagatgttccggaagagcgccatcaaccccttgagatgcagatagcccaattttgccgcaacatgtctgcgattgagcgcctagcatcacgtttgcataatcgtgatttactaaatcgcgattatgcaaacgatctgtgccggtgcgaagaatatgtcatgccccgtcgattccttgtgaccagcatctccgattcgtctagtgccgctgcggcactctggccgtatgattccgggtgggtcgaggccggaatcgtctgcctcaccgggcgccgggcatgcccatggtgaagatgatgtgggcgacggtttctggtggggcggcgaggtcggtggcgagccagtactgcagcagtccgatgctgccggatacggcgaaccgcatgcgcatctgcgcttcggccgggtcgctggaggcgggctgcatctgttcggcgacggaacggcggctgtagatcaggccgagcagctgttgctggaaatccaggtcggcggtagggctcatcagcacctgcagatggttgcggttgtcggcgatatagcggcagatgtgctcgatgacgtgctcgacgccggccgcgtcaggctgcatgagcagctggtcgagcgcggtcgtgacccatgccatcgtttcgtcctcgatgtcgtgtagcagctcctcgatgctgtcgtagtgcgcgtagaacgtggagcggttgacgtccgcctgctcgcacagcgccttgatggtgatgctgccgagcggccgttcgcgcatcaggtcgatgagcgcgtcctgcatcgccttccgcgtgtaacgggtgcggcggctttcggtcagttccttggccatggctggtccttgcctcgtatgatctcgcgccggcggattcctgcccgacattcggcaatccgactgttggttgcgaaaccgacatagtgttgttttacttgagtataacatctgttgcgtgtgcggggaggtgcatgatggcgtatatcgagttcgaccgcgtggtcaaggaatacccgtccgggcgcaccacgatccgcgcactggacgaggccagtttcaccgccgaccgaggcgaactgacggtgatcctcgggcagtcgggcgcgggcaagaccacggcgctgaacatccttggcggcatggacaccgccacctccgggcgcgtggtcgtcggcggccgcgacatcaccggactgcgcaaacgcgacctcatagcctaccggcggatggacatcggattcgtcttccagttctacaatctcgtgccgaatctgaccgcattggagaacgtcgaactcgcgtcgcagatctgccccgaccatttcgacccggccgacaccctgcacaaggtcggcctgggcgaccggctgagcaatttcccggcgcaactgtccggcggcgaacagcagcgcgtgtccattgcgcgcgcaatcgccaagaagccgaagctgctgctgtgcgacgagccgaccggcgcgctcgactatgagaccggcaaggaggtcctgcaactgctgcaggacatctgccgtgacgagaacatgacggtgctcatcatcacccacaactccgcgctcgctccgatggcgcacaaggtcgtccgcttccgctccggcaaggtggtgggcgaggatgtgaatcccgcgccgacaccgatcgccgacatcgaatggtaggtgctgtgatgggacggcatgcgcataggaacagaggtcggaaggcggacggtgattctgccgggtggtcgcccgcgtccgatgtgcccaccgaggtgattcccggaatctacgacttggcgtccgacaccgatacgggcggcaggccgtctcgtgggcgctcgctgtcgggggcgttcgtcaaggatacgatgcgctcgtggctgcacgggtggaaacggtttctgtccatcgccgtgatttcgctgcttggggtggcggtgatgaccggcatctacgccggttgtcgtgacacgttccgcgccgcgaaccggttctacgacgcgcaacggttgcacgatatccaggtgctgtcgacctacggcctgaccgatgatgacgttgcggccctgaagcaggtccgcggagtcgatgtcgtgcagccggaacgcagccagagcgtcgaagccgacgtcaagggcaccgacaaaaccgtcaccatcaacgagatcggcgtgaatggcctcgaccagccgtacctacaggacggccgcattccgagcaaggctggtgaggtcgcggtcaccaaaaagttcctcgccgacagtggcatggcagtcggcgactcgctgaccgtcaccccggtcgacaccggcactgcgacatcgaccgtttcggatacggactccgccgacagcggcgcgaacggcacggaaccgacggacgagcaagccgatgcatcgcaatcggcgccgagcttcccgaccgaactgaccatcaccggcacggtgatagaccccaaggacctgagcaatccggacggatacagcggcgccacggcattccgcaactcgctcgcgtccgactacacgttcttcgcgccgagcgacggcgtgacaggagacatctacaccgctatcagcctgaccgtgagtggctcgaccgacgaggacgcgttcggcgacgactatgacacgctggttcgcgatgtcgccgaccgcatcgaagccacggtgcagaccaagcagcagaacgaacgccggcagactctcgtggacgccgcgcagaagaagctcgaccaggcgaagaccgacgcctaccggcagctcgacgacgcgcagatgcagatcaccgagcagacggaggagctgaaaacccggcgcgagcaggcgaaaaccaccaagcagagcctcgaagaccagctcacacagcttgaagaccaatcggagcagctgcaggacggcaaagaccaggtcaacgtgggactgctccaagcccgccagggccaatcgcagctgcagcagggcatcgccaccgcgcagacgatgaacgacctggccgcgcagggcgcgcgggccgcagagcaggccgcggacgcggcagaccaggcggtcgccggcgcgcaaggtctgcccgagacggtactcgaaccattgcgcaaggcagcgaaaaccgcgcgcgatctcgccacgcaggcacggtccaaagccgatgaatccgcggcacagctcacgcaactgcaatcccagctgagccaggtcaacgccaccatagcccaactcgaagcgcaatcggccaccttgcagcggcaaaccgagcagctgcgcggcggtcgccagcagatccgcgacggactcaagcagatagccgccggcgaagagcagatggacaccggcgaacggcagctcaaggacgcacaagaccagcttgacgccaagcgcaaggatgccgacagtcagttcgccaagcagcagcaacgcgtcgacgacatcgccgcagcccgctggtacgtgcagacgcgctcgtcaatcggcggcttcagctcgctcaaatccgacatcagctcaatcgaatcaatcggctacgctttcccggtcgtattcctgattgttgcggtgctgatgagcctgaccgcgatgacccgcatggtcgaggaggaacgcggtctgattggcacctacaccgggctcggttacgggaacgcggccatcgcgatgcgatacgtgctgttcgccgcgctcgcctgcctaatcggcggcggactgggactgatggtcggcttcctcggcattccgtcgttcctgctgctggtgatcgagggactgtacacggtacccggcatacagctcgaatacgattggctgtacgggtcgacaggcatcgcgctgttcgtcgtcggcgtggtcgtcgcaacggtcgtcgcctgcgccggggctctgcggcaaagcccggcgcaactcatgcagccgaaagcgccgaaggccggcgcgcgcatcttgctcgaacgcatccgcccgctgtggcggcggctcagcttcctcaacaaggtcaccgcgcgcaacatattccgcttcaaaagccgcctgttgatgaccgtcggcggggtggcgggctgcacggcgctgattgtgtgcggcttcgccatcaacgacaccgtcgccacgctcggacccaagcagtacgaggacatctaccattatgacctgctcgtcgtcagcggcgacgacagcgtcgatgcgatgcgcgctcggctcgacaaggacgggcgcgtggaacgttcgcttgatctgcggctcgacagcggcgagatggacgcgggcgacgcaggcgagacgattcagctcatgatcgtgccggatgattcagcaggggcgctcggagacatgattacgctgcggtccgcgagcggcgggcacggcaagctgcagcttgggggcgatggcataatcgtcgcgcaatccgcggcgaactcgctcggcgtcaaggccggcgacaccgtcacgctacgcgacggcagtatgcgtcacggcgaagtgaaggtctccgcggtgacgcgaaacctcatcggctcgaacgtgtatgtcagcgaaagtctgtacaagaaaacattcggcgtgtcgacggcggtgacgcgcaacgccgtgatcgccacactggacggaaccgccgaccagaacatcgcgtacgcggatcggctcgcacgcgatccgtcggtcgtgagcgccaccagcaccgacgatctcgtgcgcagcttctcgttcgacctgatgagcgccgtcgtggcgctcatcatcgcgctcgcgggcgggctggcgctcgtcgtgctgttcacgctggcgaacacgaacgtgtctgagcgcgtgcgggaaatggccacgctgaaggtactgggcttctacgaccgcgaggtgcaccggtatgtcaacaaggagatgctgatactggccggcatgggcatcgtcgtcggtctgccgctcgggcgcgcggtcggcgggctgcttacggcggcgctcaacatgcccgcgttgtatttcgaggtgagcgtgcactggtacagctatgtgatcgccgccgcggcgacgatggcgttcgcgctgctcgtgcagctgctcaccaatccggtgctcgaccgcatcgatccggtcagctcgctcaagtccgtggagtgagccgcccgccaccgccctacttgtggtatggctcgccggcgttgattttgtaggcgcggtacagctgctccagtaggatcacgcgcatcagctgatgcgggaacgtcatcttcgagaagctgagcctgtagtcggcgcggcgcagaatcgcgtcgtccaggccgatcgagccgccgatgatgagctgtatgtggctttcgccgtgcaatccgagctggttgatgtgcgcggcgagcccttcggaggagagcatcgtgccgtcgatcgccagcgcgatcacataggcgtcggggcggatgtgcttggcgatgcgcccgccttccttggcacgaatctgccgttccacgccttcgctggcatgttcgggggtcttctcgtcggcgacctcgatgatgtcgagcttgcagtagcggccgagccgtttgctgtattcggcgatggcgtcgcgcagatactgctctttgaccttgccgacgcaaatgatgctaatacgcattatcctgctttctatctgcccggaggattacggaagatacgccgtcgtactactccgagagtcacggcacgacgataccgcgactctcagagtccctcggtgggggattggctgacgcttcgccagtcaatcccccaccgagggtattggttgatgtgtgcggatacggccgttcgaagccgaaggcgtatttcgtacgtcgagcgctgaggaaaggccgtatacgctccatcaatcaatgacgccgtagaggcggtcgccggcgtcgccaagccccggcacaatgtacgccttttcgttgagtttttcatcgacggcgcagacgacgaccttgaaggcgatggaggggtcgatgtggtcttggacgtattggatgccttcgggggcggcgatgatgttgatggcggtgacgtctttggcgccgcgctcggcgaggtagtgggtggcggtgacgagggtgccgccggtggcgagcatggggtcgatgaggaagcactgacggccggtgaggtcttcggggagacggttggcgtaagtgatctgctgggtggggtgctcttcgtcacgcttcatgccgaggaagccgacttcggcggtggggatcattttggtcatgccgtcgagcatgccgagtccggcgcgaaggacgggaacgatgatgggggcggggctggcgatgtgcttgccgaccatgggggcgacgggggtttcgatgggcttgtcgacgatgtcgaggttgcgggtcgcctcgtaggcttcgagcatgacgagttcggtgacgagctcgcggaaagtggcggatgaggtgtttttgtcgcgcaggacggtgagcttgtgttccaccagcgggtggtcgagtacgtgaagttccatgagtaccagcgtacccggttatctcacattctggatggacgcagcgtgttgcttatgtggcgtagtggtcaggatgtgcagtgaggtcggactgcaggagccgaaggcggtttcgacggcgacgacatcaccaaggccgcgccgaaccagcgcatccgcaaaggcatggcgttcgtgccgcaggggcagcagtcgttcggcacgatgaccgtcgacgagaacctgcatgtggtcgccgaccggtacgggtccgaggcgaaaacgcggtacgacgaggccgtgacgatgttcccggtgctcaaggaattcgccgtcgaacgggcggatcgctactatgtgctggcctccgggcgcttcatcgccaccggcgaaggcggtcctgcacaggttgaggccgccaaagaggccatgcgcgtataatcgcgctctcaaaacttgcagatacaaggcttttttcgagcgtcaatcgttatacctgcgagttttgagagcgcctattgcagagccttcatcaaagaagccacatgacccttcgcccggacgttgtaacgggcgatttctatcgtgccggctgcgcctgtaacagacacgctgatgacgaatgtcgagcggatcacgcctatgtgcgtgcgcccatagagcttcttttcgccgtacgcgccgtaaagccgatgcacggtcaggtccgcgtccgacagcagcgggaacgacaggtggtcgcgctcgcggaaacgctgcagcttgtcgattgggtccttggagacgcccagcacagtgaaaccgagtgcggtgagccgggcaatgttgtcgcggaagtcgcatgcctcggtggtgcagcccggcgtcatcgcggccggatagaagtacagcaccacgcgcttgccctgcgccagcagccgcgacagcgtgacggaggtctcaccgccgtccgggttgaccgcaggcagggtgaaatcgggggcgggctggccgggggtgagtcgcgtgggaagagcgggctggctggattgtccgggctgcggtgattggtcgcttgcgtgattttctgtcatgatgcgtgctcctttacctcgatgcccatgtgtgccaccactatcgccgtcgtggtggacagtcgcgcgaccgcgtatagtcgaatcatgcaatggctgcacaggataggcgaggcgattgattcgctggttgcatggtggcggcgctcgctgatcgggcgggtgattgaccggtatgtgtcgcggcgcgggccgctgctggcgaacgggttggcatatgggctactgttcgcgttcttcgccggcgtatggatcgtggtcagcgcgctcggactggtggtgaccgggagcgaggagatgcagaaggcgctgctcgcgatgctgcgcacggtgattccgagcgtttccgattcgctgttttccgcgtcgatgctgagtggaatctcgcatacgctgacatggaccggtctggtgacgctggcggtgttctggtggacggtcaccggttggatgaattccctgcgcaatgcagtgacgaccatgttcgacgattgcacgcaggagctgaacgtggttaaggcgcgattgcgcgatacggtcgctgcgatcatggtggcggtactgttcatattgtcgaccgcggcgggcgtcgtctctggcggcctgatgagactggtgttgcgggcgcttggcatcgccgatgattcgctgccgggcgcgctgttgctggaatcgaccggtttcgctaccggcgtgttgctgaatttcgcgttgttcatgctgctgctgcgcgtggtcgcgcacatacgcgcgggcaaattcacgctggtgggggcggcgcttggggctctggcggtcgcggtgatgcagctgctgggcgctcgtctgttgacgggtgcgtcgcgcaacccgatgctggcgccgttcgcagctatcatcggcgtgctcatctggttcaacttggtggcgcaggtgattatgatctgcgcggcgttcatcgccgagtgccggcggggggggggcggggagagccggagctagctacagccgctgtcagctgacagggtaactggcaccaagcattgccggatacgatatcgtatgagacggctgcgagcttcatcgcaggtcgcaaggtgcatgtctttcatgagatgtgccgtagagcatatgacgagaggggagttcccatggcgattgatgtatatggtgcaacatggtgcggcgactgccaccgtgccaagaacgcgctcgaccggttcggcgccgcttacacgtggcacgacatcgagcaggaggagggcgcggccgaccgtgccgttgagatcagcggccaaaaacacatcccggtcgtgctctatggcgacgggtcgttccaggtcgagccgtccgtcgtggacatccagaacaagctcaacgagcttggcctgctcgggtgagcggtgagtggctgcggcggtggcgaggtgcggtatcggctgtccgccattgaacacgatgcatcaattcgcgccttatggtcggcgcttttgcaaagtgaggacagcatcgttgcttgatttgaccagattctattcgtaggcagaattcgaattttggtagttgaatggttccgggagtgctgggacagtgaatgattcgacgatctcggggatgcggctgtgggaggcccggaagatccatcgtttcagcttggccccggcttgtccggtgggctggtgcgggagcgtcccgaggagttccttgagttgccatgaccggtagggctggcccctgggatccgtgtcctgccgttcggtgagatcctccgggttcttgggcacggcgtatctgacgccgcgcatcgcctcggtcgccgtcttgtcgttgccgcgccgggcctggttccgcaaccgtttcctgacctggtcgagcgcgtcgctcatccgggagacgatgtggaacgagtccgggacgcgcccggcgttcggcaggcgctccttcacgctggcgtcgatccacttggcgccgtcgccggtgactgccttgatggaggcgcgctgctcgtcggtcggctgccggaggaacaggccgggcacctccttgccgtatccgtcgtgcgcccaggcgacccgtctgcgcttgtggtcgacggccacggtgatgtacgtgtgccccccttcctgtggctggtctcgtccacgcctatcgcggtgggaccgtcgaacatgcacggcatcgcggattccaaccgggcggcgaccctgcgcgcgatatggccggcggtcctccacgcgatgcgtgggaatccgcccgcggtcttctggttggcgaccgccgccggccacgcgcactccatctcgaaaccactggtgagccggctgtccggctccgcccacggcacttgggcggccgccgcgccatgctccgcgcacgccacgcgcggcgccaggcccatgagctcgatcccatagcagccgaagtcctggtggcgccatcgccgttcgccgccacccctcccatataacaggcccgtccgctatgaaccgcaagatgaggtccacagcggacgggcctgttcgttcatatggtcggcggtcatggacatgtcccatgcctactccggcaacgaggccggaaccggcggtaccgccacgacacggcaactcgaccggtatagggacggtccataacaagttcatacggttcatcgcacattgaacatcagttgaacgacgaatgatatttgatgcgcgcaccatgaacagtgcctgaatcagccatcgtctccgaaaagcggcggatagccttgtaaaggccatgatgcgtaggcgcattgcaacggcacattcgcatcgtcgttgaaataggagagtgctagggagagcctggtcatgcatataggaaagatacgcaatatcatcaaaccagcggtggcgtgcatagcgcttgccgtgttcgccgcgccgggtacggtagtctccgccgcggcgcttgaacgtgaaggtgccccattggatgtggtggccgattggaaattccagcaggcgcattccaccggttccatcgacggtggtgacctggtcatcaaggatatgtcgggcaacggcaacgatctgcacatgcagacctacgggaaaaatgattacaagctcagcgactatgtcaactggtcgtcgaattcgatgaacggtgacggtggtggaagcctgaagctcaacggcgacagcgatctggcgcataagaaggatcatcccgagcagcgagatcccaagggcgcggatttcatcaccgcgagcggcgctcccatcaacaaagagcaatttgccaacggatacaccatggagttcgtgtactaccttcccgatgacttcaacgccggtaccgattcgtggatggggcttgcggccaggcaatccacaaacagcaacatggatgaacacgagatggggtcgatgagcctgtcgatctccaattgcaaggaaacccagttcaaggccgccaacaaggacaatgagtcgaccatgaacaccgatgatcccaacaacggcgtcaccagctggggcgtcaccatggatcacggtggcgtttggtatcacatcgccgtcgtatccgatggcacgaacgtggtgacatacaccaacggtgccaaagcattccgcaatatcaacaagaacggcaatggcctgtatgccgatccgaccgatggtcgcttccgcatcggctcgtcgtattacaacgacactttcgacaccagccaatacaacaaggacgactttgacaagttcctgcgtggcaacctgcaggaggtgagattctcccgcggtgcgctggcacagggcaactggatcgtgcccaacccgaccgagtatctcaaggattacggtaccaacgatcgtttcgtgctggacaaccccagcgtacatacgatggctttcttgccggacacgcagaatgccatccgttgggtgcccacggtgatggaccgagccatcgaccagttcgattcggaagattccagtcttaatctgaccaacatcgtgtccctcggtgacgtggtggataactgggacagtgacgcgcaatggcaggcatcgtccaaggcgttcgggcgtatgcagaaagtgggcgtccccttcctggagcagccgggcaatcatgattacaatggaggcaggcatggctacggagtgcccagcttgcgcaaggcggacaattacctgaaacacttcggacccgactccgatttcggcaagtatcagaaagaacacggttttgcatactcgcccgatggcctgtcctcataccatctggtagacaacggctcctacaagtatctggtgatgaacatcgacatgggcgcggtggtcagcaactcgtcctcggcaagcaatgacgatatgcgatggttcgagcaggtgctcaaagaccacccgaacaacccgactgtggtggtgagccacgatatcttcaagtgctccgattcacgtccgaatgaaatctccctcgatgacgattccggatacaacggtgaagccggtgacgatgaaggtgccggctcgaaaatctggaacatcgtgaaacggtacaaccaggtattcatgatgtactccggtcacaatcacggatccggacaaatgaccctgaccaatgacgccggcaatccggtgctggggctgttgtccgactatcagttcgcgtataacggcggcaatgcgttcttccagtacgtcggcatggatgaagcgaacaacaagatcaccatgcgtacgtattcgccatactcggcatcgctgcccgcggccgagcgttcgttcttcgatgtcaactccctgaccggtgtcggcaacacctatgacggatcgttcgatttcgccaaacgattcgccggttacgaacattcctccggttatgacacgcagcagtcggtgatctccttggtgcgcggcatcggtgcgttgaatggtcagacgccggcgagcgaagtacggcaactatatactgctctggccgcattgccggataatgtgaaagcgcaattcggtgatccgtcggatagtggctctctggcaggcagactcgccgccgcatacaatgccgcgttccccaagccggaacagcccgacaccaagcccggtgccggcaatcagactggaagccaaggtgggcatcagggtggacagtccggaagccaacaagggcagaagggcgatggccatggcaaggggcagacgaatgccggcccggaggcaatggcctccactggtgccgatgtggcctcgatcgtcgttatcgcgatgatgacgatcttgttggccggcgtgcttgtgctcgtgaagcgtaagcatcacctttcgcactaaccgattaccggtgtgcaacctgtcgacgagcgagcagccaatagctgggcctgatatagaacccgcggtactggttgctcgctcgtcgaatcaaggaaaaccgaagcacgcttcgcgccaatgccgaagacgccgatggcttgccgtgtcgccacctgcgcattggcgtcatgattgtcgtgatcgtggcctacgtgatgttcggcccgtttcgcggcgacatcgttctggtctttggcgcgtcggcgatcttctacgtttccggtacgttcgcgtttccggtacgttcatcatgatgacggtcatcctttccctgaccggtcccatcgagcacggtcaggaagagcggcaagccatcgaggtcggaaccggcggtgtgtcacctgtcggccaggagcctccatcaactagtatcagctagtatccgatatgaagccgtggcctcattgccaatcgccaagggaggaaaccgtgcgcgcgcgacgtgactttgcatggccgaaactgctgaccgcggacggacgcggcatcgccttcggcggcgactacaatcccgaccaatggccggaggacgtctgggacgacgacatccgcctgatgacccaggccggtgtcaacaccgtggcccttgccatcttcagctgggaccgcctccaacccaccgaagaccattgggattttggctggctcgatcgcatcatcgacaagctcggcaaggctggcatcgcggttgatttggcatccgcgacggcgaccgcacccctgtggctctacgaaaaccatcccgaagtccttccgcgagacaagtacggtcatccggtcaacgccggctcccgccagtcctggagcccgaccagcccggtgttcaaggaatacgcgctaaccctatgccgcaaactcgccgaacgctacggcgccaacccatatgtgacggcatggcatatgggaaacgagtatgggtggaacaatcgcgacgactactccgacaatgcgctcgaagccttccgcgcatggtgccgccgcaagtacggcaccatcgacgcacttaaccaggcgtggggcaccacgttctggggacaggagatgaccggtttcggcgaagtgctcatcccgcggttcatgggtgccgattccatggtcaaccccggccagaagcttgattttgaacggttcggcaatgacatgctgctcgacttctacaaagccgaacgtgacgcgatcgccgaaatctgccccgacagacccttcaccacgaacttcatgatctccaccgaccagtgctgtatggactacgccgcgtgggcggaggaagtggacttcgtatcgaacgaccactacttccacgaaggcgaatcccatctcgacgagctggcctgctccgacgcgctcgtggattcgctggcgctcggcaaaccgtggtacgtcatggaacattccacctcagcggtgcagtggaaaccgctgaacacccgcaaatgtaaaggggagacggtgcgcgactccctggcccacgtggccatgggcgcagacgccatcaacttcttccagtggcgcgcatccgcgttcggcgccgaagcgttccattccgccatggtcccgcacgccggcgaggacacgaaactgttccgtcaggtgtgcgaattgggcgcgacgttgcgggcgctcgccgacgccggtgttcaaggcagcggattggcggcatcggacgcggcgatcctcttcagcgccgaatcggagtgggccacccgatccgagacattgccgagcatgaaactcagccattggcatgatgtgcgtgactggtaccgtgcgttcctgaacgctggtgcacgcgccgacatcgtgccgctcgcctacgactggagttcctataagaccatcgtgctgccgaccgtactgatactgagcggcgccgatacgcggcggttggccggtttcgtacaggccggaggccgtgtggtggtcgattacgcgaccggtctgctcgacgcgcgcttccacacgtggctcggcgggtatcccggtgcgggcgatgggctgttgcgctcgatgctgggcgttcgtggtgaggaattcaacattctcggtgctggggcggaaggcgagccgagcgagattcggctgacgggcaccggggattcatccacgatggacggtgccgtgacccgcctgtggcagaacgacgtgaccgtcgccggaccgcatgtgcaggtgcttgccacatatgccggcgaagaagcggatgagtgggagcttgatggcacggccgcgctcacccgcaacgcatacggcgcgggggaggcgtatttcctcggctgtgatctgggcgtgagcgacctgacgcgattcgtgagcggttggcttgccgcgcagccgcaatcctcccgtcagccgcaggtcaacagtcagccgcaatccagccgtcagccgcaagtcatcggcgcgacccctgatgttctgcacaccgtgcgtcaatccgacgacgccatattcgacttctatctgacacgtggcagatcggatgtcgaactgcgtggcatcgccggggagccgatcgtcctgttccgggcggaacggggcagtgacggcggtgcgtatacggtgcatcgcaatggcgttctcgtggtgaaacgcccgaacccatcgctgtagtcaattgcggcgaaacaagggaatgggggcgcggacggttttgggaaacggtccgcgccccccctacagagattccggtggcgactggctgtttccggctctatttcaacgtttttggactgccgcttaagtgcctggccgcttaagtcgccgctccttcagcgtgccgcgacgggccgaaacggatagttggtgtagcagggcagcctgaggttgtgtcttgctggtttgggaaaatgatggggaaggaatttggccgatactctggtgcagcgaggagtgggccggggagggggtcctccccggtgttgttatgcggcgttggcgaggaagatgtgcttgtggtgatactcgatgaactcatgcgaaggttggctgattgccggcaatgagatctcatgtccatcgaagtcatagagtcatctgtcgttgatgtcggagtgccgcaccttgtcatggttgaccatgatgcggtagtcgtcatcgatggagatgaggccttggtcgaagacccgatcatggaaggcgttgagcaacagcccattcgatgcggcggttttctcgttgggcgtcgatgccttccaaggtttgatgtgactggcgatcagtagtttgggaatctgcatgccggttatgcagcatgtgccgtggtagttctgcaatagtgagttgcggaaataggattggttgacccgttgaagtatggttgccggtcgctcctctccggtgggcgcgtgttcggcgatgaacagggctgttgctgtttcgagcggcgaacaatggatggtacgccagaaagtgtgcccatgtatccgtatgagattgccacccgtctttcggatctgggcagacttgactattccgctcagccggtgatggagtccacccgggatgatctcgatccattggagcgtgaccgcctgcgcaaaatcatcgcttcctatcaatccagtgaccggaatcttttggagctttcggatgcggacttggagaaatcgctgcgccttgttgtgttggtcagtggtgagctgacgccgactttggcagggttgctgcttatcggcaacgaagaagcgctgcagaggcttgtgccgacgaatgaggcggcttttcaggttcttgtgggtaccgacatcaaggtgaatcagacctaccgtggcccgttgctcaaaaccatagaacagatagccgagtcgttcaagccctggaatccaggcacggagctgaccgtgggtctgttttcttcggtggttcccgaatttgacgaaagggctttccgagaggctttggtcaacgcattcggccacagggactattcgcttcttggtcgtgtgcgggtattggtggatgatgccggcttaaccattgctaatcccggtggattcgtggaaggtatcaacgtccataacttgcttactgcggagccgcgtggccgcaatccatgcctgatggatgcgttgaagagaaccggtttcgccgaacgtacggggcgcggcatcgaccgtatattcgagggtgctttgaactatggccgtcctctgcctgattattcgaggtccaacaggcgtggagtgtcggtgctgttgcctcgtagtgtgcccgacaaggcgtttgtggaactgctggccgaggaacgtgagcgcagcggcaagtccatgtctctcgatggtctgcttattttggacaagctcaagagtgaacgtcgttgtggctttgatgtgttgtcgggctctctggacatgagtgaccagcgtctgcgcaccgtactggggcagctgacggaggcggggcttgttgaaagcgctggcgttggagctcgccgcacgtatatgttgggtgcgaaagtgtatcggcgcagcggtagggcgatggaatacgttcgccaatcagacatcgatagggtgcggtatcccgaactgatcatcgagttaatgcatgaacagaaatcagtgagcaaaaacgatgtgatggaattgctgcatcttgaggagaatcaggcgtactaccaattgcgaaaactagtccttgaaggacgcgctaagaaggtcggcagtggacgcaacgtgcggtatgcggcagtacgttgaatgagatacgcagatcattcttgaacggttttctctgaattcagagaaagaatatcggaattcagagaaaactagtgtgcgatgtggctattccgcttcaggaattatgtacgattcgaacgtggcctgtatctgcgatgccgtcagccgctttatcggtatgctccctatgcggggcttgatgtggttcccgtagctgttcccatagcgcgtccttgtgctgtcggcgatgttccagatagttcacgtcatgctcccttgcgtgatgattcacatgattcgcgtcttcatggtagcgtctcccgccggcgcatgagtgactggtcacgctgtcagtggaatctccccgacggatatcccgcctatgcgggatatccacgccggcgtacggagattcgcatgttcgggcgtacgatggacccggtttttgcaggatgcggccaacgccttggatgggcatgggcctgcaaccatcgtgagccgccacgggcgttcggcgatcgccgggcggcggatcgagaaggatcgggcgatcggggccgcccaccatccgaaaccatcgtcggcgtcgcttcagcggggcatgccgacggttcgcgttttccggcaaagggtcggccggcgctttcctcattgaagttcgacgggtcatggtcccgccgtgagggttggaccggtaatcgggtgatgccgaacgtcccgacgggacggcggccgtgtcatcaaagcgaccgcacgaactctccgcccggaagcggacggcgctgattttggatgacccatcggccgtggcattcccgggcccggaacatgacatggggtttgcggaccccgggcgacgccgcatggccttcccgttcccgcgccacgggcggcggcatggttcatggcgccgacggtgggtccgtccgcacgcggagcgcttccatgcctcgctgacggatggtggcgatcccccccccacggagaggagtattgtttcatttgtagataacattgttacacagtaggagaacattgatatgcaatctgaacgttcgttgattcccacccccatgccggtccggagacacgcacggtccgggaacagggggctggccctcaccgccctgtgtctggcggtgctgctggtcgtgatggacaacaccatcgtcaacgtcgcgattcccacgatgagcgacgcgttgaacgcctcgtccacggacctgcagtgggtggtggacgcctacacgctgtccttcgcggcgctgctcctgcccgccggcaaactcagcgaccgatggggaagaagacggatgctgctcgtcggattggcgggattcgccgtggtctccgcagctacggccttctcctgggccctgtggcagctggtgacgctgcgcgtggtgttgggggtctgcgccgcgctgatctatccggcgacgctgtcgtcaatcatcgtcatcttcgaaggctccaggtaccgtagcctggccgttggcctgtgggcggcgacatcaggggtcggcatcgccctgggcccgatcatcggcggcgtcctgctggagcactatgcgtggaattccattttctgggtgtgctccgtcatcggcgcggtggcgctggcctgcatcgcggtggcggtgcccgaggtacgggcgtaccgttccgagaggttcgatttccccggcaccgtgttatcggtggccggcgtgggcctgctggtgtgggcgatcatcgaacgcccgacttacggctggctctcctggcaggtcataggcggcatctgcgcggccctgatcatacttgcggtgttcgcggcggtcgaggggcatacgcacgccccgctcatcgatgtcggcctgttccgaagggccacgttcacgagcagcacctgcgcgatctgcgtcgcgttcttctgcctgttcggcttcatcttcatcaccacccaatggttccaggcattgcgtggatacaccgcattgcagacggcggtcgcgacgctgcccttcgcggtggtcatggcggcggtcgccccgttcgccacgcaattggcgaaacgtttcggataccggtcggtcgtctcgacgggactgctgttcctgtcggcgagcatgttcgtggtcacgcgtgtcgacgcccattgcagctactggttcgtggtcgtacccaccatggccctgatggcggccggcatcgccctgatccaagggcccgccacggacgccctgatgagcaccgttccggaaagctcgaccggcgccgcatcggccgtcaacgacacgatccgtgagatcggaggcacgctgggcgtcgccgtcatggggtccgcgatctcctccgtctaccccgacgagctctcggactcgttgtccggactgcagatcccgtcttccatcgcgaaagccgcggaggattcggtgatggccgcgaaatcgatccttccgcacctgccggcaggcatccgacagaccgtggagcagtccgtctcgaccagtttcatgagcgccacgcatgcggcatgctggatcgcctgcgccctcgcattggcgttcgcgctgctctgctggatcacacttcccaaacacgattcaggcaatctcccccaatagaaaggagcatccatcatgaaagacgacggacggatcccacggatcaaggacacggatatgacggaccgtctcctgatggccggcgcgatagcggaggacacacgcaaccccatcggtgacatcgcggcatgtttccccggtcacggcagccagagcgtcgacatgttccacggctgcctgtccggcttccccgaagcccggcaggtggattggcaacggtgtgttggacggtttcttagaggacgagtccttgttgtgtgaattcgttggggctccggtatgcgagggtggagtggagtctctggttgtcggaccaccacacatagtcgtcggggtcggagcgtagttgttccaggctggtgtagtggttccggtatatgagctccttcttcaggagcctgttggtggattcgaccacggcgttgtcgaacccgccgccccggtccgtgcggaacacctccacctcggtcagggggaagccgagcgtggcgaacgcggccatgaccaggccggcggcgcggcccgtgtcggcgccgtggccggcgatgcccctgttcgccaggccgatgagcgggcacgcgtacgcccactcgccgccgacgcgcacgtacgtcaggtcaccggccaggtgggcgcgcggcccgtagccgtcgaactcgcggtcgaggatgttcgcgagcccggcctcgtcggcccgcgtcctgtgcggttcggacgttctgcgcgcgtacgcgcccgccatgtcccgccgtttcatgatgttgacgatgcgccttccggaggcggtgacgcccctccgctccagcgcggccttgatcttcccggcgccgcagcgctcatggccgtcgcgccggaccgcgtgcacgtcgccggcgatcgggtccacccgcccggcttcgggatgttcgatcatccagcagcaggcggagcggggaacgcccggtatcctgcactgcgccgatatcggacagcgggaggcgtcggcccgtatcactgctaccttcgtgcgaataccggcgccgcctgttctgaaacgtccacctccatctccaactgtccgttgcgcttgcgcagctcgaccggctcgttccgctcaggggtgcggttgtcggcggctttcgcggagccgctgtcgcggatgccctggacccaacggtgcagcgtggaacgcgagatgtcgtactcgtccttgatctcgcgcgccggcttgccgttctcgtaaagccgcacgatccgccgcttgaacgactcctcgtagtggcggggatgcctcgggtcggccatcgtcggcctccaacctcatgtcaatcgacccccatcgaactgtctaacacattgtagccaatccatgcgggagctccgcattctgaaggatgccctgcggcaccaccggtagccgacgggcatgcctgacgtgcgtgcgggacgatgccacggtgccgccgtcccacacgccgacggcatcatatgcgcgatgccccggcatggcacgcggcgggaggacggcacgcccgcgccggccagcgttccccgacatgtcttggctcggtggcaatctcaatgcggtgggactagccatcacacccatcgaggcgcggtccaagagcgtggctggaccttcgaccccacccatcatgggacggtgcagggacctatgggccggatggcgtttttcatccgtaacggcgggatgatgcggagaagcatatgaggactattcggaaaacgacaaaaagccagcggacgcccaccaccgagatcaggggcctcatactcgacgcctcgaaacgaatcatcgaagaggacggctatgacgccttcaccatccggcttctctcggaaaaggcggatgtgtcccccgcgagcatctaccggcatatcggcgacaagcaggccgtcatcgacgctctcatcgacgacagtttccagacgttacgggagaagctcctgcgcgtcaccaccgaggatcccctgcaaagactctacgatgcgggagtcgtataccgcgggcacgccaaggcgtcgcccggcatctacgccctgttgtggcgatggcatgcgggcgaggcttcggaggcatgcctcgccgccatgaccgagctggtgcgctacgggcaggccgcgggaaagatccggagggatgacccgcacctcatcgcatggtccatatggtccgccgtgcacggattcgtccaattcgagacacgacccgaacatgatacgcccgtcgacgatgacgatgcggcctattcctttctgctccggctgctcattcgaggggtccgcacccctcagacggtctccgagggaacggcgaccatcgcggataccagccgatcgtagaatcgccattggccgcgcaacgccacatcccgtctcacagcggcgaacgttccatccgccttcaggctcacggataccttacggaagtccccgtcccgtccaatgcggacaacgccttcgaggcggcctccttcgcgcagaaggccgccctacgttccaccgaggagaccatacgcaatgatgcgagctcttcggaagagaacacgaaccgcatgatcccgtcggacaatccgtccgaatcgtccacgtccactcccacggcacggattctttccgccgacgccacggcggcgacgcacagcgacggacaatgcgacagcgatcccacgatgccggacggccagagcggttcaccatccgaacctttgagtatgggcccgtcatggccgatacgtcgtaaggcctcgtgggccaaaagacgcgtctccgtgaattcccttcttcgtttggccgtggcgttcccgaccaaggcccgctcaccgtcgaacaatcgcacgcggcgcgtccccttccccgagatcagcacctcgcagccggaggcgagcagcggcccgaacaggcgagcccgtcgcatcatgaggtctgcgcacatcatggagactctatataccgaaacccacaaacccagcaacggcaaggctttctaccaattcccagaatgagtgtaccactctgttcgccgctcaaagcccgccagaaggaaatttgcgcttttccataccttcacgccgacaagaggtgtcacgattacctatatctcccatactttctatgttttcttgtgtaggaaaatgtaaaagtgtaaacaccgtcggaatcgacggagacgttctcatatgacacgccgatcgatcatcgaatgtcatgagtggctcccttcagacatagagtggtgcaccgatttggcctaccggatgcaccacgtaacgtgccaccgatatcgtcgggccgaacaccctctgaagacactacaaggacactattccgacagtccaagccgttcggaattgttgaaaggaaactgttttcggcaaaagaaaagggctctcgaatttcttcgaaaaccctgatggcggaggatacgagattcgaactcgtgaggctgttacaccaacacgctttccaagcgtgcgccatagaccactaggcgaatcctccattacgctgtttgccgcggccttttggcctcaacagacaactcgaagagaataccacagactcgcggacaagcaaaaccgtcgcgtgttgtgcgtgtgtcgcgcttggcggctcgcgcgtccgggatccctccggcgctccgatgcccgaattcagtaattgttcgagccggcaccctcgaagcgcacgttgaagccgcgctcgtagtgcaggaacatgtcggcgccgtagcggtccgcgtcgcggtgggtgaacagcatgcggatggcaaatgcggtctgcgcgtcgtgcggcatggcgcggaacgccttgtgggcgttccatcccgtctcggtgatcgcctagtcgggcacacctaccagcttgtcggcgtgcagtccggcaagaacctgtccgccacggcttccggcgattccgcactgtccatcgccgacacgcccgagaccctgaccgacaccaagaagcaggcctggaagttcacccagatcgaccagtccgacaccgagcgccccggcctcaaggcctacgtcatcaccaatacggactgcaaggtgctcgtcgccaaggacggcaccaacgccttcagcgatgagtcggtggaagacgccaagtccgaccccgcggcccggtggattttcgacacgtccgacggtgccacctaccagctgctcaacgcatccgcgaagcagaacatcaacgtcgacgcgttcgacccgaaggccggtgcggccgcttccgatgaggaggacggcgatctgaccgacaagatcctggtcgaaggttcggtgaacaccgagaaggccggtgaatacacgctgacgtattcggtgaccgactccgaaggtgcgtcgtacacggtcaagcgtgtcgtgaccgtcagggagaagtccgagccgatcgaaccgagcaagccgatcgaaccgaccgaactgacgaagccgactgagccgacgacacggtgaagccgaacaagccggatgccggcaacaagcagcccggcctgtcgaagaccggcgcctctgtgagcggcgtgttcggcgcgttcgcggcactgctcgcggtcggtgccggcgcggcgcttgccgcccgccgtcggcgcgagccccggcgctgaatcagcggatcggcatatgatgccggtcggtcacctattcggtggccggccgactttttgttgactgccggggcctcacgcgggaggtgaagtccacccatcccgccaaagtcccatttgagtgtcttcggatgggactttcgccggaacaagtcgaaaggaaccggggccgggactcatgggctggcgcattgccagtcggccctgtgttcgtgtcgcgtgggatgatggtggcatggtgacatcgaacgttgtggagtttgcggggaaagcgcgcatgccgcgcctcggcatgggaacgatggcgctctctatcgagggacgcccggaccgggcgacggccatcggcacgatccatgccgcgcttgacgccggagtgcgttatctcgacaccgcatggtcgtattatctgccaagcgaaccggggcctgacggtacaggcgtgccgcgtgatttcgggtacggcgagatgctggttcatgcggcgctcgccagctggagcggtccgcgcgatgaggttctggtcgccacgaagactggttatcgccgaacgctggaagtgacgaaccgcgacgcggaagatcctcagcaatccccgggcgacggcgcgagcgcatccgcatccgagcgacagcacctgcaggcggccggcagccggtacgggtggatggccgactcgcgcccggagacgatgattcgtgacgcgaaggagtccgctctccgcctcggcgtcgacgcgctcgatttgttgtattcgcatggccctgaccccgcggttccgtatgaggatacggtcggcgcgctgaaaaccttgctggatgagggcgtgattcggttcgccggcatctcgcgcgtggacaatgcgcagattgacaccgcccgtgggattctcggcgaccgtctgattgcggtgcagaaccagttctcgccatcgcatcccgaccccgagcatacgatgggtcactgcgccgatctcggtcttgattttgtgtgctggtcgccgctcggcgggttcctggacgcattcgacagtcatgcgtatgatccgttccgcacggtcgcagcggcccgcggcgtctcgtaccagcgtgtggtgctcgcgtgggagctgaccagatatgaccgtctgttcaccattcccagtgcccgcaacccgcatgaggtccgggactcgttcgccgcagtcaatctcacgctcgcccctgaggagctgtctttactgccgtgaatcaacgctatgagtcaccgtcataaatacggaacaggctcgtcgtcaaacgagcctgagatacatgctggtggttccgggaatcggttgaaaaccgaaatgcgcatagaacgcgcgtgctttatcgtcgtaaggttccacaatgagcgcacgtgaccctagtgcgccgctgacggatcgtgctcgcagtgccgaatatgcactcagcgtgtagaatcccgccggttcacctgacgcagtgaatgacacgtacgcgacggccatcccatgctgggtcgatgacggtgcgcgttgtgcggcccacttgtcgatgaacggtactccacaagagaacttccccattctctcttccgggccgagcttgcgcggacgttggaaatgatggatcatgcccactgcggatccctttccatgagtttttttcggctgctggtggagccggctgatccaatgcctgtatgaaatcttcgaatgcctgtgattccagatgcaggacggttgcttcttctatatccttacgggctgattccaggagatggcgagcggtccattgcgtgagcgtgctgccggtcagctcggcggcacgctcgatgagctgccgttgcgcatccgtcagtcgaatgtcaagccgggacgttttctgtttcgatactgtttgcttcgttagtgtcgccatagaattgttgtacggaaaaagcgtacagatcaagtttagtagcgggggagtaaagcgcggacatataatcacatactgtaaattgtttacggtgtgagctaatattacagatgttcgcacgatgtatatgccgctggaatgtattggcggtactccgcggagcgcggtagtgcggcaatggtcgaatcggaaggcggtgcgaaatgggttttgagcgggaggcgctcagcgaactgtacgccagcgtgtggggcaaccgttccaagatgcagaaggagttcgcgcgcggtgcgcatggcgagccattcattctgcacgagctcgcactgcgcggcaccatgacgccgtcgcagctcgccagttcgctgaaggccagctccggccgcatctccacagtgcttgccgctctggagaaaaaagggttgatcacccgagacatcgacccggacgaccgccgcatcatccgcgtgaaccttacggatgccgggcgagagcggtccaagtgcgacttggaggagatgcgttcggcaatctgttggatcttctcgcagatgggggagcggcgcacgcgcgagttcgttgatctgctgtcggagttctcgacatacatggccatctgccatcccggcgcgccgcgcccgacccccgatgaggtgcgggccgcgttcgccgagcgtgacaggcgtgtcgccgatcatatgcggaccgagcgcgcgaaggccggcgaggagtagcttcttccgccggctgcggatgacgtgggggacggcgtgcgtgccgtgtctctcgtgcgcagccagcgcaaagcgcgccattcacagcgaatacacagaataatgcgtaatatcttacactgtaagtaatctaacaacagaaactaattcgggcatcggatatcgatgccgcggcaaataacgtaaccaatcaccaacaaaacacaaggggaaagccaatgcttcgcatcctgaaatacctctccaaagcggagatcggtcagatgctcatcgccctggtgaccatcgtcgggcaggtcttcttcgacctcaaactgcccgattacatgtcagacatcaccacgctcgtcgagacgccgggcagcgcgatgagcgacatctggatcgccggcggcaagatgctgctcatctccctcggctccgtcgcctgtgccatcgtcaccggctacatctccgcacgcgtcggctcgtcattcacccagcgcctgcgctcgctcgaattccgcaaggtcgaatcctatggccccgccgaaatgagcaaattctccaccgcgagcctcatcacccgctccaccaacgacatcacgcagatccagatgttcatcaccatcggcctgcagctcatcgtcaagtcgccgatcatggccgtatgggccatatgcaagatcgccggcgaaggtttcgaatggactctcgccaccggcatcgccgtcgtcatcctgctcgtcgccgtcgtcatcatgatggccatggtcatgcccaagttcaaggccatgcagaagctcaccgacaacatcaacctcgtggcccgcgaaaacctcaccggcctgcgcgtcgtgcgcgcctacaacgccgaggactaccaggaggccaagttcaccaaggccaacaaggacctcaccgacacgcagctgttcaccaaccgcgtcatggcgttcatgatgccgctgatgaacaccgtcctgaacggcctgatgctcgccgtctactggatcggtgcctatctgatcgacgccgccggcctgacggacaagctcaacgtgttctccaacatggtcgtcttctccaactactccgtgcaggtcatcatgagcttcctgctgatgagcatggtattcgtgctctggccgcgcgccgacgtgtccgcgcaacgcgtgctcgaagtgttcgacaccgatccgatcgtcaaaaccggcaccaagaccgccgccgacgtggcgcgtctgggcggcgggaaaaccggcaccgtcgagttccgcaatgtgagcttcacctaccccggctcacgcgaggcgacgctcgaaggcatcgacttcaccgccgaaaagggccagaccgtcgcgttcatcggctccaccggctccggcaagtccagcctcatcaacctcgtgccgcgcttctacgacgtgtcggccgggcaggtgctcgtcgacggtgtggacgtgcgcgaatacgatctgaaagcccttcgcgacaagatcggatacgtgccgcagcagtccgtgctgttcaagggcacggtcgcatccaacgtgagctacggcgacgacgtgaacggggcaagctccgcggacgtcgaaatggccgacacctccactccggccggccgcaaacgcgaagccgaactcatcgccgcgggcaagagagcggaaggcgccgcaatgccgactgaacagatgaaccgggtcaaggcggcggccggcgtcgctcaggccaccgagttcgtcgagcgcatggacggcacatacaccgccccgatcgcacaaggcgggtccaacgtctccggcggccagaagcagcgcctgtcaatcgcgcgcgccgtctaccgccaccccgaaatcctgatcttcgacgactcgttctccgcgctcgacttcaagaccgaccgcgaagttcgcgacgcactcgccaaagaagccaagggatccaccaagctcatcgtcgcccagcgcatcggcacgatcatgaacgccgaccgcatcatcgtgctcgatgacggcaaggtcgtcggccaaggcacccatcaggaactgctcgacacctgcgatgtctaccgtcagatcgccgaatcccagctcagtcagtcggaactgaccgcgtgagatcaatacggacttttaaggagtaacaaatgccaggaccaagaggaccaatgggcggcggccgcacggtcgaaaagcctgccaatttcggcaacgtgatgggcaagctcgtccactactgccgcaactacctgcccgtcatcatcattgcgctcgtgctgggcgcggccggcacgatatgccagatcatcggaccggacaagctcaaggacatgaccaacgagatcgtcaagggactgccggccatcgtgaacggcaagccggtgatgaactcggtcgatttcaacgccgtcggccgcatcgcctggctgctcgtcgcactgtacgtcggctacgcggtgctcagctacgtgcaaagctggatgatggcgaacgtcacccagcgcaccgcccagcgcctgcgcgaatcgatctcggtcaaaatcaacaagctgccgctcaaatacttcgacaaggtcagctacggcgacgtactctcccgcatcaccaacgacgtcgacgccatcggccagacgctcggccagtccctcggctcgctcatcacctcggcaacgctgttcgttggcgcgctcgtcatgatgttctacaacaacgtcatcatgaccctgtgcgcgatcggcgcgagcatactgggactcatcatcatgatggtcatcatgaaatcctcgcagaaatacttcgcccgccagcagatggcgctcggcgacgtcaacggccacatcgaggagatgtacgccggtcacctcatcgtcaaggcgtacaacggcgaggccgactcaatccgccgcttcgagaagtacaacgccgacctgtacgaatccggctggaaatcgcagttcctgtcaggcctgatgatgccgctgatgaacttcgtcggcaacttcggctacgtgatcgtgtgcgtggtcggtgcggcgctcgccatggacgggaagatcgaattcggcgtgatcgtcgcgttcatgatgtacatccgcctgttcacccagccgttgagccagttcgcgcaggcgttccagaacctgcagcgatgcgcggccgccgccgagcgcgtgttcggcttcctcgaagagccggagatggatgcggaaccgaccaaggccgaactcggcgtggctgatgccgctgcgagcacggcacggacggacagcggcaagctggcgcatcgcggcactcgcgcgaatgccaccgccggtatgacggcttcgcagcgttcgcagctgctcggctacgatgcggccggcaacccccggaccgtgcgcggcgacgtcgaattcagtcacgtgcgattcggctatgagcccgacaagccgatcatccacgacttctcggcaagcgtctccgccggccagaaagtcgccatcgtcggtccgaccggcgccggcaaaaccaccatggtcaacctgctgatgcgcttctacgagatctccggcggctccatctccatcgacggcatcgacaccacttccgtgccgcgctggaacgtacacgaccagttctccatggtcctgcaggatacatgggtgttccgtggcaccgtgcgcgaaaacatcgcctactccaagcccggcgtcaccgacgagcagatcgtctccgcatgcaaggccgtcggactcgaccacttcgtgcgctctctgccgcagggctacgacaccgtgcttgacgacaacacttcgctctcccaaggacagcgccagctgctcaccatcgcccgcgccatggtgcaggacgctccgatcctcatccttgacgaagccacctcctccgtcgacacccgcaccgaagaactcatccaaaaggccatggatgcgttgaccgtggggcgcacgagcttcgtcatcgcgcaccgcctctccaccatccgcgacgccgacatgattctcgtcatgaaccacggcgacgtgatcgagcgcggtacccacgaggaactgctcgcggcgggagggttttacgccgacctctacaacagccaattcacactcaccgattgatggggcgcccgttgcgctcgctggattgatgaggctgacagcccggtgaacttacgcatggcagtgcgccgtgcgtgggctcgccgggctgtttgctatgtaggcgagtgatgggcggagaatttcctatatatggtgcgcgacgggttcggggactgtggtttgcgtccctatgtgcgcacggtcgtcgttccggcgcgcacatagcgacgcaaacgggagaaggattgttgagagcggatgcgctggtgcggcagatggccggtgtgcttccatagaacatgattgtgacgagagcagaggggcgtccggcgcgtatcgccctctcggtttgccacacaatgcgtttttcgatggtttttgggctggtgtggtacgcgggcatcggaggagtcgtttcgggccgttgaaaaatggcggttttgcggtgcatgttgtgccacaccacgtgatgtgagggttcacatttcattgtgaggcagactggctggccacacaatgcgattttgatgtgattttgcgctggtgtggtacgcgaccggctgcgctgacgacttggccggccgatggcgcggatggtgtgctcccgctgtcaggagctgccgagcgtagcgaggctgggggcggtcttgccggcggccctgcaccctgtgataataatgccaagaatgttacgtaattctgggaacaacggtatccagggactttctgagagctgtgattccaattgaagacacaaatcgccgacggacttgattcttttagtaaacaatgtatatattaacatgaaccggcaaagctgctggctgccctataggagaaagaaccaaatatgaaacatagagcgatgtcatcgcgtctgatgccactggtggcgtcctgcgcgacggtcggcatgctgctggccggactacctgcgtcggccgtcgcggtcagcacgacgagagcggcagcgtccgacgcctcgtcctccaccacagcaaccatcactccctccgccgataccacgttgcagacgtggacgagcgagaagaattcctcaatggcatccaagccgtacatcggcacactgcaagggccctcgcaaggcgtgttcggcgagaagttcgagtccacggatgccgcggacaccaccgatctgaagaccggcctgctgacgttcgacctgagcgcctacgaccatgcccccgattccgcaacgttcgagatgacgtacctcggctaccgcggcaacccgacggccaccgacaccgacaccatcaaggtgacccccgtcgacaccaccgtgtgcaccaataacgccacagactgcggcgcgaatgtcgcgaccggcgcgaccaagccgaagttcagcatcaacgactcctcattcgtcgccgagtccaagccgttcgagtacggtacgacggtttacgcgggcgacgccatcaccgtggttcccgccaataccaagaaggtcaccgtagatgtgaccgaaatcgtgcgccagcagttcgccgaaggcaagaaggtcatcaccctggccgtgggcgagaccaagaagaccgaggttcgtttcgccagttccgaaggcacgacgtccctgaacggcgcgaccgcagacatggctccgaagctgaccgtttccgtgtccaccaaggacgatctcaagccctccgccgacaccacgttgcaggcatgggccagcgagaagaacgagaagaagaacactgcggcctatgtcggcgcgctgcagccggaaggcgattacggcgacttcggtgagaagttcaagtccaccgacgtcagtgatgtcacagacgccaagatgggtctgatgacgttcgacctgtccgattacaccgcggcgcccgagcactccatcctcaccttgacgtatctgggctacgccggtgcagacaagaccgccacggccaccgataaggtcaaggtggtcgctgttgacacgtcgcggtgcaccggcaccgctccctgcgacaccaacaatgccacgtgggcgaaccgcccggacttcgaggtgaccgataccacgaagaccgcgacgtcccatgcgttcgcttatggatctaagaagtattccgatggcatgaccgtcgaatcgggcaacgccaagaaggttctgctcgacgtgaccgacatcatcaaggcagagttcgccaagttcagcgccggcgccaccgagaagaagatcacgctggccctgggcgagctcaacaagtccgacatgcgtttcggcagcaaggaagtcacctcgctgaccggcgccaccgaggccatgcagccgaccttgtccgtcaccaagaagccgaaggcatacacgctgagcatcgaaggcccgaccaaggtcaagtaccagaagggcgaggcgttcgacaaggccggactcgtggtcaaggccaccagcacggccgacggcacggtcaagacgctgaccgaaggcaacggtgaggataactacaccatcgacaccagcgctttcgatagtgccagcatcggcgtataccctattaccgtgaagtacaacaaggaccccgaaatcgccgcttcgttcaacgcctatgtcatcgccagtgttgaggacggcggagacggcgacaccagcaaagacgactggctgtggtacaagcagcccgcgtcgcagactgacgccaccgccaccgccggcggcaattacggcaaccccgacaacaaccgttggcagcagaccaccttgccgttcggcaacggcaagatcggcggcaccgtctggggcgaggtcagccgtgaacgcgtcaccttcaacgaggagacgctgtggaccggcggccccggatcctcgaccagctacaacggcggcaacaacgagaccaagggtcagaacggcgccacgctgcgcgcgctcaacaagcagctcgcgaacggcgccgagacggtcaatcccggcaacctgaccggcggcgagaacgcggccgagcagggcaactacctgaactggggcgacatctacctcgactacgggttcaacgacacgaccgtcaccgaataccgccgcgacctgaacctgagcaagggcaaggccgacgtcacgttcaagcatgacggcgtcacctacacgcgcgaatacttcgcgtcgaaccccgacaatgtcatggtcgcccgcctcacggccagcaaagccggcaagctgaacttcaacgtcagcatgccgaccaacacgaactactccaagaccggcgaaaccacgacggtcaagggtgacacgctcaccgtcaagggcgctctcggcaacaacggcctgctgtacaactcgcagatcaaggtcgtcctcgacaacggtgagggcacgctctccgaaggctccgacggcgcttcgctgaaggtctccgacgcgaaggcggtcacgctgtacatcgccgccgcgacggactacaagcagaagtatccgtcctaccgcaccggcgaaaccgccgccgaggtgaacacccgcgtcgccaaggtcgtgcaggacgccgccaacaagggctacaccgccgtcaagaaagcgcacatcgccgatcattccgccatctacgaccgcgtgaagatcgatttgggccagtccggccacagctccgacggcgccgtcgccaccgacgcgctgctcaaggcgtaccagaggggctccgcaaccaccgcgcagaagcgcgagctggaaacgctggtgtacaagtacggccgctacctgaccatcggctcctcccgtgagaacagccagctgcccagcaacctgcagggcatctggtcggtcaccgcagacgacaacgcccacggcaacacgccttggggctccgacttccacatgaacgtgaacctccagatgaactactggccgacctattcggccaacatgggagagctcgccgagccgctcatcgagtatgtggagggtctggtcaagcccggccgtgtgaccgccaaggtctacgcgggcgcggagacgacgaaccccgagaccacgccgatcggcgagggcgagggctacatggcccacaccgagaacaccgcttacggctggactgcacccggtcaatcgttctcgtggggttggagcccggccgccgtgccgtggatcctgcagaacgtgtacgaggcgtacgagtactccggcgaccctgccctgcttaatcgcgtgtacgcgctgctcaaggaggaatcgcacttctacgtcaactacatgctgcacaaggccggctccagctccggtgaccgcctgactaccggcgtcgcgtactcgcccgaacagggcccgctgggcaccgacggcaacacgtacgagagctcgctcgtgtggcagatgctcaacgacgccatcgaggcggccaaggccaagggagatccggacggtctggtcggcgataccaccgactgctcggccgacaactgggccaagggcgacaacggcaacttcaccgatgcgaacgccaaccgttcctggagctgcgccaagagcctgctcaagccgatcgaggtcggcgactccggccagatcaaggaatggtacttcgaaggtgcgctcggcaagaagaaggatggatccgccatcagcggctaccaggcggacaaccagcaccgtcacatgtcccacctgctcggactgttccccggtgatttgatcaccatcgacaactccgagtacatggatgcggccaagacctcgctgaggtaccgctgcttcaagggcaacgtgctgcagtccaacaccggctgggccattggccagcgcatcaattcgtgggctcgcaccggcgacggcaacaccacgtacaagctggtcgagctgcagctcaagaacgcgatgtatgcaaacctgttcgattaccatgcgccgttccagattgacggcaacttcggcaacacctccggtgtcgacgaaatgctgctgcagtccaactccaccttcaccgacaccgacggcaagaagtacgtgaactacacgaacatcctgcccgccctgcccgacgcctgggcggacggctcggtgagcggcctcgtggcccgcggcaacttcaccgtcggcacgacctggaagaacggcaaggccaccgaagtcaggctgacctccaacaagggcaagcaggcggccgtcaagatcaccgccggcggcgcccagaactatgaggtcaagaacggtgacaccgccgtgaacgccaaggtcgtgaccaacgcggacggcgcctcgctgctcgtgttcgataccaccgcaggcaccacgtacacgatcgcgaagaaggcgagcgccaacgtgcccgtcaccggcgtgaccgtgaccggcgccaacaccgccaccgcaggcgacaccgtcactctgacggcgaccgtcgccccggccaatgcgaccgacaagtccgtcacctggtcgacctccgacgccgccgtagctacggtcaacgccaacggcgtggtgaccacgaagaaggccggcaaggtgaccatcaccgccacgtcgaacggcgacaagacgaagttcggttccatcgagatcaccgtctccgccgcgaccgtgcccgtcaccagcgtcaccgttgccggcgacgccgcgatgaccgtcgatggagagcagaccctgacggcgaccgtcgccccggccgatgcgaccgacaagacggtcacgtggaagtcctccgacgccactgtggcgacggttgacgccaacggcaaggtcgtcgcgaagaaggccggcgaagtgacgatcaccgccacggccggtggcgtgtccggcacgctgaagatcacggtgagcgacaaggccccgaccgtcatcccggtccagtccgtgaccgtgacaggcaagcaggagctcgtcgaaggcgcctccacgaccctgacggcgaccgtcgccccggctgacgcgaccgacaagacggtcacgtggaagtcgagcgacgagtccgtcgccacggtcgacaaggacggcgtcgtgaccgccaagaaggccggcacggtgaccatcaccgccacggccggtggcgtgtccggcacgctccacatcaccgtgacggccaagcccgtcgagaccgtccccgtcaccagcgtggaggtcaccgtcgaggccggcaccaccgtctccgtcggcaagacactccaggccaccgcgaccgtcaagcccggcaacgccaccaacaagaaggtgacgtggaagtcgagcgacgaatccatcgcgacggtcgacgccaacggcgtcatcaccgcgaagaaggccggcaaggtcgtcatcacggccacctcgaccgacggcacggacaagtccggcagcgtcgagatcaccgtcgtggatgagaccaagccgacgcccgaccacaagtccgtcaaggccgataccggcgacgtgaccgccggcaagaccggtacggtcaccgagccgaaggacgtggcgggctggaagagccgctccatcatcaagcaaggcaagctcggcaaggccgaaatcgccgacggcacgctcgtgtatgcggccggcgacaagaccggtgacgacagcttcgtcgtgcagtacacgatggccgacggcacggtcatcgacgtgacctacagcgtcacggtcaaggccgccgaaaccggcaagaacgacggcgacggcaagggcgacggtgtcgcgaagaccggcgccgccgtcggcgcgctcgccggcctcggcttgatgctgctcgccgtcggagtgagcgtggtgatgattcgccgcaagcactccgcctgatccccagtcagaccggccagtcgtgaccggtcggcctgactgactctttctccaccgtcccccgtcggataaaccccggcgggggacggtggcttgttgcggccggtctgccgtcgcgcgcggtgtggcctgcagccgggtgccgcacgtcacgctcatgcgcgatactggagacatgaagatttccgctgacttcacggtgatgcccgacgacttcgccaaagccgccgcgcccgaataccgcaccgacggcgtgcccgtcatctccttcccgttctatatcgacgagatcgatcccgccgcccggtacctgcactgggcgttcaccgaccccgactccatcccggtctgcggattcgaatggattcactggacggtcgcgaatctgcccatcgacgcgctgatgtacgacttcaacgattcccatgcactgcagattccgccggacttctcccggcagctgccctccatgattcccgagaccgtgcagggccgcacgtcggccgcgagcaagctggtcggcagcacgaatccgcaggtgacgatgcgctataacgggccccagccgcccgacaaggaccacgactattcgctgcacgtgtggggcaccgcgaagccgttgccgggtctgaaccaaggattctggctcaacgagctgttccacgcgctgcgtgacgtcgaccacgtcaccgatcagggtgtgatgttcatcaccggaaaagcctgagggctgatgccgtatactcccgtacggagtcatacactcatgtgacaggaggcgcgccgcggatgcgcgccgcaacgtgcacgcgacagcgtgtgcacagcaagaaaggacagtaccgaatactatggcatgcaccacgattctggtcggcaaggacgccagctatgacggttcgaccatcatcgcccgcaacgaggattccgccaacggcgaattcaacccgaagcggttcgtcgtcgtcaagcccgatgaacagccgcgcgaataccgcagcgtcatcagccacctgaccattgacctgcccgacgatccgctgcagtacaccgcagtgccgaacgccgacctgaaggaaggcatctggggcgaggccggcgtcaacgaggcgaacgtggccatgagcgccaccgaaacgctgaccaccaacgagcgcgtgctcggcgccgacccgtttgtggaataccgggcggcacgcgggcgggaaggtgactcggattacgagccggccgtgcccggcggcatcggcgaggaggacttcctgaccatcgtgctgccgtacgtcaccaccgcgcgtgagggcgtgcagcggcttggcgaccttcttaaggaatacggcacctatgagatgaacggtgtcgcgttctcggacgccgacgagatttggtggatggaaaccgtcggtggccatcactggatcgccaagcgcgtgcccgacgaagcgtatgtgacgatgccgaatcagctcggcatcgacgaattcgacctcgatgacgccctcggtgagcaggagaaccacatgtgctccgaggatctggtcgaattcatcgagcgcaatcaccttgatctgtccgtcgaatcgacgtcgccgttcaacccgcgtgatgccttcggctcgcactccgactctgatcacgtgtacaacacgccgcgcgcatgggtcatgcagcggttccttaacccgtacgacgagatgtgggacggccccgaggccgaccaccgcccggacagcgacgacatcccgtgggcccgtcagcctgagcgcaaggtgacgatcgaggacgtaaagtacgtgctcagctcgcactatcagggcacgccgttcgacccgtacggccacctcggcgatgagcacacacgccacatgtaccgcccgatcggcatcaaccgccagagccagctggccgtcatgcagattcgcccgtaccgtccgcagtcggaccgcgcgatccagtggatcgcctacggctccaacccgttcaacacgctggtgccgttctacccgaacgtcaacgaaacgccgaagtatctggaagacacgaccacgcgcgtgacttccgagaacttctactgggagaaccgcatcatcgccgcgctgtgcgacgcggcgttcgcggagacctccaacgccatcgagcgctatcaggagaagaccggcgcgatgggccaccgtctgatcgccgccaccgacgagcaggtcgcgcgtctgggcggtgccgacgaggccgcggccgccttggccgacgcggagttggaggcggcgaacgcggacggcgacgtcgaaccgatggatcccgaggacatcatcgacgcgacccgtaacgacgaggtgcgcgacatcctcgccgccgccaaccagaccatggccgaccagctcaagaccgagaccgaccagctgctcgacaccgtgctctacaccgtgagcatgaagatgaagaacggcttcaaccgctccgacaactgatgcgctgagaggctcccggccaagcgttttcggccgccagccgcttcgacggtaagcaagcgtcatacatctacagaaaggttcacctactgatgactactatcgaggagttcaccagccagtacgggctggtcaagaagatcgacgccttcgggtttatgaagtacctgcacgacaatcccgacgcgccgcgcaagcacggcaaggtcgtgctcgtcaccgccgatacgccgctcaaggcgtcgcgcggcgagggcaagaccacgacgacgatcgcgctgatcgatgcgctgcgggctcgcggcatcgacgcgaccgccgtgctgcgccagccgagcatgggcatcaccgccgccggttccaaaggcggtgcctcgggcggcggcaaggcttcgctgacccaccccgagctcatcgactggggcctgtgcggtgagatggccgccatcgccgccgcgcagaacctgctcgtctccttcgccgagaaggctgtggacgaggggcgtatcgacacgatcctcgtgccgcgcgtctccgaagtgccgtcccgctcgctgcgttccatcaccgtggacgcgggcaagaacaacgtcgccgagaaggtcgtgctcaccccgacgtccgagctgatgcagatcgtcgtgctgtcccgttcgatggatgagatcggcgagcgcgtggccgcgatgatcgccggcacgaaggacggcgaaccagtcaagttcggcgacttcatcgacctgtggcgcatcaccgatatgctcgccgatgcggtcaagccggcgctcaccgagacggtgaacggctcgccggtgtatgtgcatggcggcccgttcgccaacgtgtcgatcggcatcccgacgctggtctccgtggagctggcgtgcgccctgcacgatgtggtcatcgtcgaggccggttacggcaccgacgccggagcgcagaagtggctcgacatcgcctgccgcgagtatggcgcgcagtggccgtccgcggcggtcgtcgtgacccgcgcctcgacgtggcgtgatgacccggagctggcgtggcgctacccgttccacgtggaccgcttggagaagctcgacattccggcgttcccgctggtgaacctgtgggacggcgaggacgatcagattcccgaactgcgcgagaccgcggcccgtctggagctgcgcgaccccatcatcggcaacctgtatcgcgacggcggcgagggcctgagcgaccagatcgacgcattcgtcgatgtgctgtccaacgcgtcgatgccgtccaagcatgacagccacaagggcatggccctgctggagaacgtgaagtgggtggccgagaacgcctacggcgtgccggccagccgtgtgctgctcaaggacggtttcctggattccctgggtgctgcggatgatctgtgcaaggccgccggcatgtcgctggacgatctggcgctggtcgccgtcaagtccccggccacgatgaccgacaatgaccgcgctccggaagacgagcgtacggtcaccctgaagaaggtcgaagtgcacgcaggtgccgggctggttcacgtgaacctcaccacgtccctgaccaccccgatgcccaagatcgtctgattgcggcagaggcgtgccgccggggtgccggggtacgcgtgctgtgagagtgtgcggcggcgtggcatgcggaatcatgccgcactcgcgctgaccgcacaccgtgactgcatcatcacaacccctttcggattgtcggccgatcatacgggccgactggccgcaaggggctctttcatttatatatcggtaacctgtgtgccgcaaaaaggtgtcactgtgtgagggttacgtcactgtgtgcgtcctcacactccgtgacgtacccccgcaacccttgcaaaataagggttttgcgatttacgtcactgtgtgagggctcgcagcgtgacggtggtcgcacacagtgacgccatgcgcgacaatatagcggcggataccatcacacctgagctcagaagttaccgccgttccagccccagtcggtggtggcggtgtagcggatgtaggtgcggtcctcggggatgccgagctcgctgttgagcgcggccatgatcgacttggtcagcttctcccacgcagaaccgggcacggaacggccgaacacattgacctcgacgtatgcggccggggcatcgtcgctgccgccgaagtagatcggcatatcatcctcgaatgggcacatcagccagccctcggacttgccggggacggccgtgatcgccttgccgtaggcggccttcagcgcctcgcgctgctcgggagtggtcttgacggatacgtgagtgtggataacgggcatgattcctccttgattgggttcgttccctatcctaatcggttccgcggcgggcgcgggctgtgcggccatgtgtgaaatcagtggcggttcaggaaaaccgcggtgtgaagtcagcgatatgtattagacaatcaatgtgaggaaattgattgaacagctgatgaagttcggtattgtcggtgtggtcgcgttcatcatcgactggggtctgatgaacattctgctgatgacgcatatgcataacgtgctggccacgtcaatctcgttcttcgtctcgctgatattcaattacttggcgagcatgaaattcgtgttcaagcaccggccggacatggcgcgctggatggagatcgcgattttcttcgtggcggcgcttatcggctggttcatgaacgaggcgatcgtgtggaccagcacgtcgtggatgccgcatgattccatgtattccatgcacacgaagtacgtgctgtggacgaatgtcggcaagctggtagccacggtagtggtgatgatctggaacttcgtgatccgcaagtggctgcttgacgatacgcataccaatgcgatgaaccgtttgaggaagtccgagaaccgtttgagtcaggaagagctcgaagcgaagtgggagaacagcttctcgcatcggcttggcctgtggtcgctcgcgcatacgccggagggctggccgaagtagcgcggtatgcgctctcaaaactcgcagatagagggtgttttccttcaaaaatgccttgtatccgcgagttttgggagcggcatccggcgtatcacacgctgacttcggtcagagtcggggtttcggtgctggatttgatctgccggaagccgacgaaggcgatggcaagcgaggtgatcgccagcacggtcgccatcaggaagcctccatgcgatcccatgtgatcgatgaagacacccgcgatggctgagccggctgacgagccgatcgagttcatcgcgcccatccacgccacgccttcggtgaatcgcgtgggaggcaccagatgcagcatcagctgattgccgttgatccacgtgggtgcctggcagacgccgatcagcaggtagatgatcatgatcacccacagatgcttggcgaacatgaacgtgcccacgccgagattcaccacgatgaggcagaagtagaagcgcttccacagcgggatggtccagttcttcgcgccgtacaccagtgcgccgcatagcgagctgaacgagaagcatgcgaacacgaaaccggtgtattgcttcatgttcgcttcggtggcgaacgcgatgatcgagatgttcgacgccgactggaacgcgccaagactgaaccaggtcacgcacacggcgatcaggcccggcccccagatcgactccttcttgccggcgcgggaatcggcgatggctcggtcgacggcggcctgcacggtctgctcatcgtcgccgcgggcctcggcctctcggcgggcgcggtcggcggcgtccctctcgcgcatcttctgcgccttggcggcctcgcgcttgcggtactcctcgcgggtcagaccggcctctcgggccagctgggtctgtgatttcggctcggtcgtcagctcggtcaggaacatcagtgcgccgatgacgacgcacacgccggtgaacgagaacgccagcaggccagaaatcaccgccagcgtagaagccagcggattgccgatgatccacatgcattcatcgaacacgccggacagcgagagcgcgcggtcggtgcgctcccggtctcccttgagcatggtcgtccagcgggcgcggctcatcgcgccccacggcggaatcgcggcgaggaacggcgtcaggcagtacagcacccataccggggcgcggttggtgatgctggtggtcagggcgatggcggcgacgatccagaccaggatcgtcggaatcgacacctgccgctggccgaacttgtcgaccagcttgccgagcagcgggctggagaccgccagcgcgatcgcctggatggcggtgagcacgccggccagcgagtagttgccgtagtaatgctgcacggagatggtgatggtcatgccgaccatggggaacggcatgcaggcgatcaccgagccgatggagaaccttgcggtgtgcggcatacgcagcagttccgcgtatccgccgaataccttatgggcgacttccttgattgcagccgcgacattggcgttattggacatgacagcatctcctttccgctcccgattggatgtcccccgtcggcgtggcgttgccggcggagccctcatcgtattgatgtgttgtcctgttggtcgcgcaaaggatgctttgcatgtttgcgtcacggcaactttaatcgcgcgtcggggcgcgacacgcggtgttgatatcacgaacgcatcaattttcataacgttcataaacgacggtgatatatcggtgtatcagatgggatgacgagccggagtcggggggtggagtcaggacgatatcgggtggggctgggccgtgccggggcggggcgatgttcgtcgggcaaacgccgccgcggacgcggcatcgccggccggccggtgaatgtgggacaatgaaagacagacatcacgagtcccgcaggaaggccgcatatgccgacaaccaccatacatttcgtccgccacggcaaggtatacaatcccgaccatctgttgtacgagcggctgcccggattccacctgtccgaccgcggcatgcgcatggcgcaggcgacgggcgcatacatcgcagccgaccccaagctcaacacggtcgccgcggtgtattcgtccccgctggaacgcacccgcgaaaccgccggtgccattctcgacgcgctcaacccggtacgcgccgggcgtggggaggagccgctggaactcatcaccgacccgcgtgtgatcgaagcgggcaacgagtttcgcggcaagcgcatcggacatggcaagggcgcgctgtggcgcgacggcaactggaagctcgtgctcaacctgtggaagccgagctggggcgagtcgtaccggcacatcgccgaacgcgtgggcgcgttcgcgaacgagaagatccgcgagtatgccggacggcagatcatcgtcgtcagccacgagtcaccgatctggagctaccggcacctgctggagaccggccaccccgagcattggatgttcctacgcaagaccgcgctcgcgtcgatcacctcgatcacctacgacagcgatacgggcaaggtgatgtccatcacatatgccgaccctgcggcgcaagtcgagtgagtgcggcgtgcgccggccgtacaatacacagagaggacggctgcgggctcgcccgcgaaaaggtgcgcatgcggcgcgggccgggactgacggcggccgcgtagcggtcacttgtgacgacgccgcgtaacggcaacggcaggcggcgagtggccggcggtgctgtgacgcggtggcccgcggtgccggcgaccggcacctggcacccggcacggcggaaggttccgcgcgtcggcggacaatgaaagcgaaggagcgatatggcattccaacttgacgcgacggcgatcgcccatgtgtcgatgaatcccgcggtacgcgatgcggcggccgtcggcgccggactgatcgaactgtggccgctgaccgacgccaagcagatggacaatgacacgaaatatggtgagaacctgcaggtgcggatgacccgcatggccgcacgggtcatgaccggcgacgacgtgacggtccccgatgcggagttcgtgtatgagggtgcggacgagattcccggtcgtccgcagcgaatcgtcgatgcgttgctcgccgcgaatgacgcttacgacgagatgggcggctactccgaaaccggcgacacgaggctgatcatgagaggcgccggccagttgggcgtcgattgggatgatgacaccgtgcacgccatcgacgaagcgttggaggcaatcgaacaggccatcggtgccgccgatggtgccgccggtggtgccgccgccggtgccgccgcgcctgcgaatgctgcgcccagtgccgatgtcgaagccatcgcgcagcgattcgccacggtgacggtggcggccgacgggttgctgcgcctgatcgatctgcgcaagccgtcgcgcgcggtgccggtgatgttctatgtcaacgaactgtgcgagcgcctgtcggtgccgcggctgtgcttcaaggccgagcagctgtcgtcgctgatgaccgcccgatcgctgactaacgacgacgaggccgtcctagccgaaacggtgaaattgtttactatggtcgcggcgagtgagtggaaacgtcaccatgacgacgtgctgtgggatgccgccgaggcgaagcggctcgcgaaagaggaggacgagcgccgcaacaaggaggcgctcgccgccaagttcgcgcacgtgggcgacgacccgtccaagccacccgtggagctgtgacggctgccgcctgacgtctgatgggacggggcggagacctgaaatatatgcgattcaccgctgactgctcggaatcgtgccgacctgcttgcggcgcggccgctgaatgtggcgtacctcttccagaacctgaggaacgccttgccgaacgagcacccgtagtagggtttgtccagcggtggctcgcctgtgccgaactgagaggggccggcgtaaggactgttgccgccgtactccggcgcggccgtatatggctgctgtggtgcggcgccggctctattcgccgtcgtcgttgaacgcgatggtgtcgtccgggccgaggagcaggcgttccgcgagactgatgatggtcagcagcagtgcggtcagtgcgaccaccatgatcgttgcggagaagatcagcggggtgcggaacgagttgaaagcggcctgcagccagatgcccaggccgttcatcgcgcccagatattccgccgtcaccgcggtgccgaacacataggcggcgctgatacgcaggccgccgaacacctggcgggcggcgacgcgcagcttcacatgccacagcgcccatgcgcgggtggcgccgcaggtgagcgccacgtcctcgtagaactgcggtacggcgagcatgccgcggcacgtctgcacggcgacggggaacacgccgaatacggcgacgatcacgattttgccgagcggctcgaacccgaaccagatcatgaacagcggggcgatggtgatgagcgggatggtctgcgcggcggcgagcagcggatagataccgcgatacagggttttggacacgtacaggccgatgccgatgagcaccccggccaccgctgcgatgagaaagccggtgattgcctcgtatgtggtgatggcggtcgcctcccacaggtcgggccaagtcttgacgatcgatgcggcgatctggctgggggaggcgagcacgcgttgggagatgtggcccgcatccacggcgatctcccatacgatgagcagcccgccgaccgtgaccgccggcggcgcgacgcgtgcgaacagggatttcagtgtgcgcatggcgtgatcttcggacaatgtgaaaccttagggatgggattgatggggactggcgggttgacgggctgacggagggagatgggccgggtaggagggagaagggccccggaatcgttacgagagtcggaaaactcccctccgtcccgtctcgtgacggaccgaaggggagcggaggttggcccggccggctgtgacgaacctgtgctcgcggattcgctgaactgtagatagattggctgtggccggactggctgcagccggatcagcccacgtactcgttggtcgcgaggtccttggcctgcggcgcggacgcgggatcgttgccgtcctggtccttgtaggtgccggccttgtactggaactccaggtacggctgcgcgtcatcgaagttcgtggtgccgggcagcgacttcggatcgtcggtcgtccagtagttgttcttggcgatctcctccatcgaggtgcgggtcagcttggagtcgagctgcgcctccttggcctgttcgaccaggatgtcggcggccttgtccgggttggcgagcgcgtagtcgtagcccttcttggtggcggcgatgaacttcttcagcgcatccgcgttggcggagtccttgagccaggagcccttgacggcgaatcccagctggtcggggttgccgggcacgccccagtcggaggcgacgaagcagttgagcttcgggccgttcagctcgctttccacgccttcccaggtcacgtagaagccgccgaaatcacccttgccgctggtcagcgtctcgaaggtgttggtgccggccgtcgcggtcttgatgtcgccggtgccgccagcgtacttgatcatctggcggacgaccgcggtctgctcggcggagccgaagctgacgaaggtcttgccggaaaggtccttgggcgtcttgatgtcggtgcgggacgccagcgcgcaccaacgggcgaccggcttctgcgtcaggtcgaacacgaacttcaggtcagcgccctgcgagttgaacgcggcgacgttgctcagcgtggtgaagcccacgttggccacgccgttctcgacgctggtttcagctccggcctgggcggtcggcaggatcttcacgttgacgtcggcatccttgtaatagccgagcttctgagccacgtacagaccgatgtggttcgtgttcggcgtccagtcgagcatgaacgacacggtcggcgtggagccggagttcttggaatcggtgttgctcgcggaattggtgtttccgcaggcgctgagcgtcaggccgagcgcgacggccccaaccatcgccacgatcttgctgaagcccttgactgtcttcatcttctgtctccttgccttctgcgcacatcgtgcgcctgccggctgacacacgccgggcgggaaggtgaggagcccgcgcgacatgaatcagacccgtcgcatcgcagcgcgacacatatcgccttgcaatgcgtttacttctctgatgtctggcacggctgctgccaccaaccgcgcgaacgttctccagtatagcggtatgcgggggatcgtggtatgtctcgacgggcggcttcgcgcaggagccggtgtgacggcgcggcatcgggccgccatggcatgtctcccgccggtggacatgtgtttgccggattgccggggcattgctgttttctgctgttctcggggcggaccgtttccccgccgggttcatgggctacgatgctagtggctcgtgaaatggcttgtgagatcaaggaggatgccgatgatgaaggccgtgttcttcgacttggacgggacgctgatcgattccgatccgtattgggtgcgctctcaggagaccttggtgcgctcctgtggcggggaatggagcgacacgctcgccgatgcgctgcagggggcggccttccccgagaccgtgcgtctgctgcgcggtgcgggggtcgattgggatggcgatgcaatcgtgcggcacctgtccgatgaggtgctgcgcatggaaaaggagcgtctgccgtggattgagggcgttcgcgatgtgctgtccggtctggcggcggcgcacgttccggccgtgctggtgaccggctccccgcgcgagatcgtcgagaatgtgatggcgcaggcgcctaagggcgcgttcgtcggctatgtgtgcggcaacgacgatgtgacgccgaagcccgatccggcgccgtattggcgtgcggcgtcgatggtcgggctgccggccgatgcgtcgggtgctggtcagtgtctggttttcgaggattccaagcccgggttgacggcggctcgggcgtcgggcgcgacggtggtcgcggtcaccggtcatgctcgtgtggatatgagcgacagtgggctgtgcgatgaggcaatcgttgactatcgcgggctgaccatcgccgatttggccggctggatgtgatgtgccagccagattgtcgtggcgttgcaacggtttcatgggttgttccctcatattcgcacgtgtttgggcttcgcgtgactcggtcggataacaggaacttcatccttcggcgcgaaagcggcatctgcgtttcgagggggtgatttcgtctcgcccaaacatctatctacgtttcgaggggttgctgtctgccagtatacgaagtatgaggggcggaatatcgccatcaatatagggaggattgacgaaaagcaaccccttgaaatgcagatagatgtctgcgagggctgcgatcaaccccttgaaaccgagaaagtggtgttgcggactcttttcgtgtggtggcgcttgattatgttgtggcttggctgcgacatattgcgagtgcactgtcgatgatgagtgaatggcggtggggatgccattcgatgatatgaagctcgtcaagcgtggaatctccagtgtacgagcacgaatccgctcgtttgcgtccctaagtgcgcgccgaaacgacgaccgtgcgcacatagggacgcaaacaggggcatttgcgtccttatgttcgcgcgcttgtcgtttcggcgcgcacttaaggacgcaactcggggagtgacgggagtgtaggcacgtatgtgggccttgcggcgcagcaaagatatggggcagtcccaaagaaaccgggtgaaggtagcggtgtgaatgagcgcggcatgtacgaacacggggtaggtgggcaatgcgcaatcagcaggaacggtggtgcgtctcgggcgggaatggtcggaaggatccagcgcgctgacaagtaggaggggcgggcttgcgaggcgaaccagcatggaaggagttggcgcaccgcattgactggcgggagcgagcggcggaacgaaaggggtgtaaacaaggcaacggggagtgccgcgtgtgaccgtttacatacatgagtgtagggattgtgtgacgactcgctgtgcgcgctaacacgatttgcgttttgccagtggttgcgatatatgagtatcaacgataatttcggttgcggtgatggaatcgaaacaagcaattggagctgtataagtagtaatacaaggggacaatcatgaataacgatcagaacaaggtcatggaccagcgcgagatccgcgaggacgagtcgcaggattgggcgacgctgttcgccggtctcgccgcctgagcgcgccgaaatatcctgaccgaggcgcacttgccggattgacgatacatcgccgtacatggaatccgacagtcacccatcggcaggacgacgcagcaaccttcatgcgcaacgccgtcgaagccgccatcaaagccggcgcttcgaccgccataccagcagccgttccttctgccatcgacggcgcgaccgtgagaccgattgaccaaaagtgagtgaaccggctcacgtcccgttgacgcggcacaatggaacgtatgactgaagctgaacattcaaaagacaccaaaccagaacttccggctcatgttcgcgtgcgcttctgcccatcgccgaccggcacgccgcatgtcggcatgatccgtacggcgttgttcaactgggccgaagcccgcgccaccggcggcaagctgatcttccgaatcgaagacaccgacgccgtgcgcgactccgaggaaagctacaaccagattctcgaatccctgcgctggctgggcatcgactgggacgagggcatcgacgtgggcggcccccacggcccgtaccgccagtccgagcgcggcgacatctacaaggatgtggccgcaaagctgctcgaagccggctacgcctatgagtccttctccactccggacgagatcaaggagcgcaacctcgccgccggccgcccggccgaattcggctacgacggttacgaccgcgacctcaccgaggagcagaaggccgccttccgcgccgagggccgcaagcccgcgctgcgcatccgcatgcccgacgaggacatcgccttcgacgacctcatccgcggcaccatcgaattcaaggccggttccgtgccggactatgtcatcgtgcgcccgaacggcgatccgctgtacacgctcaccaacccggttgacgacgcgatgatggacgtcaacgtcgtgctgcgcggcgaggacctgctcagctccaccccgcgtcagatcgtgctgtaccgctacctgatggagctcggcatcgccaagcagatgccgctgttcggtcacatgccgtacgtgatgggccagggcaacaagaagctctccaagcgcgacccggagtccaacctgttcaaccaccgcgacaacggtttcatccgcgagggtctgctcaactacttggctctgctcggctggtccatcgcccccgaccgtgacgtgttctccatggacgagatgatcgccaagttcgacgtgcgcgacgtgaaggccaacccggcccgcttcgacatcgacaaggccatctccatcaacgccgagcacatccgcatgcttgagccgcaggacttcctcaaccgttccgtgccgtacctgcaccgcgacggtgtggtctcggccgacaattgggatgcgctgaccgaccgcgagaaggtcgtcctgaccgcctccgctccgctgatccagccgcgcgtgcgcctgctgggcgaggtcgccggcatggtcggctccctgctgtccaccgaggagtacctggagcctgcggacgatgccaggaagcagctcaaggactccgccgccgacgtgctcgatgccgccgtcgccgcgcttgagggcgtggacgaggccgattggaagaccgacaacctgcacgagaccctgaacaaggcactcgtggaggatggcgggtacaagccgcgtctcgccttcggcccggttcgcgtggccatatccggccgtcgcgtctccccgccgctgttcgagtcgatggagatcgtcggcaagccgctcaccatcgctcgactgaagggcctgcgcgagcacctgtgatgtaacgcagcgcttgtgcgcatgcggaatccggcgggcggctgtcgcaagacgccgcccgccgtctgctatctgcggagtttgcgcctccgctggcgggctgagccgtgaagcgaacggaggtgtcgttcgtaatcgaaggcgagccgacatacgagtagacaatactgcccccgcaggggtgtcacgaagcgactgggggagtctccgccgatcaggcgggcagaactcctccgctgatttaccgccccaaataacgctccgccgtaacatacctcccgttcttacccgtgaagttttctgttcctcgatacacgacgattctgcgatcgaccggcatgcccagttcttcctcgacggtggcgagatgcctgaagaaatctggtcgcggagtcattctcgatttgatctctatgagggtggggctacggcgctgcgtagcgtctacgaggtcgatttcgctctggttggtatcgcggtagaagtacagctcgccgtctttgttcttgttgaggtatcgcttcacggtttgcgaaatgatgagattctcgaacacatcaccgcgcttggggtcgttcagcagctcttccgcagaatgaatcccgagaagatagttgagcaggccattgtcgtggaaatagatgtcgttcggcgttgacgcgtcatagaggtgaggatagccgccgcggaacatgaattcgtccgcggtgaggtcgggttccggctgaatcgcctcctcatgcgagaggggcggcagttgaagcatgcccacgcgccccgccagagattggcctaatgcgcttctccatgaggaagttttgcgagccggacagcacgtattgccccatgccgcctcgttcgtcggccgcgacctggatctgcgagaacagtcccggagcatgttgcgcctcgtcgatgatgagtttcgcgccgtgtgatcgaatgaacccgaccgggtcatcgatggcgctgatgcgagtggtttcgtcttcaagattgacgtattcgtaatcgggcagcatgtttttgatgagcgtggattttgccgctttgatgtggtcctgtcactgagacgaccgggaaccatgacagcatcgggatgagctcttgcgcgatggtccgtggtatcatcattgtctcatttgcaatttcatcaatacagtgtctgataattcatcaataggattcatgcaaattcatcagtaggattcgtgataatccgtcagtgcatgtcttatatcgttgcaatataaggtttttttgacagtctttgtggctcaattgacgatggtagtgcggtaatggcccattcgtgagaatctcgaccatgtcatgcgacccgcggcacgattgacgtgagccgtttcgccatcctcgatgatggtcggtggagatgcagcctaacgtatctgcgtcgtgccgtctcgttcgatgttaccgcataacgcttttgttgactagattggttgggatattttggagtctatcggatttcgtcggtggtcaagagcctgtcccaaaaccgttggaaatcctagcgacacgccgtgagttgcggtgggctggatattgccgtatagttttcatctgttgcgcggcacgccgcacagcggataactcaagcccccatcgtctagcggtctaggactacgccctctcacggcgccaacaccggttcaaatccggttgggggtacgaaggtgctataatcccaatcggttacagcatctagccaaattgggatgtggtgtaattggcaacacagctgattctggttcagccattcttggttcgagtccaggcatcccagcgaatgaagctctcgcggaagcgagggcttttttgtttctcggcgcattcagccggcggattcgtggcctataggccggatccgtccaaaatacgggttgaaatcgccgaaatctactattccccgtgtgaaatcgccgtttttgaaccttaaaacggcgatttcacacggggaattgccaagaacggcgatttcaacccgtaattcagtgtcccggcccgctcaagacacgccatggtgctgtcaggcacggtcaaggtggtatgtactacgctgtgagttatgacggatttcaaccagattgcagcgccggcatccgctagcggccccgatgacgagcgcccggtgtccatctcggcgcgtctgggacgtctccagttccaccgttccggcaagttccgcgtgttgcagctggcggacatacaggatggtccgaaggtctccaaagacaccatccggctgatcgaggcgtcgctggacgccgcgcgccccgacgtcgtcatattcaccggcaaccagatcgccggatacgacgacgcgtaccgcgacacgttccgcaagcggcagtgggagccggcgcggcgcggcaagatcgagcgcacgcgggccaaggtgcgtgtcggcatcagtgcgttcctgcagccgctgatcgaccgcggcataccattcgccgtcacctatggcaaccatgatgcgcagtgcgggctgagcccggccgagctggacgcgctgtaccgtgagttcccgggatgcatcaacccgccgtgcaatatggacgattccgccgcgaatcccggcttcctggtgcgttcggtgccgtcatccggtttgccggatcagccagtggccgcatgcgagcccggcacgttcgcaatgcctgtcctggatcaggatcgccaacgtgccgtgctgggtctggtggtgctcaattccggcgattacgcacgggagggcggctatggccggccgagcgacgccgcgctgcgtttcgtgcacgacgtgccgcggtggctcggcgtccgctccctggtgttccagcatatgccgttgccgcagttttatgacgtgctgaaggtcatgccggcgaacgccgataacgccatacaggggtatcgcaagtacgatgcgcagtattacgtgctcgatgatgaccggacgctcccgggcggctatctgggcgaaggcgtgagctgtcctgacgaggattgcggcgagttcgccgcactgcgcgacacggacggatatataggagtggttgtgggccatgaccatcgcaatggtttcgtcggctcgctcaacgggatgatgctggtggcgacgccgacctgcggattcggctcgtacggaccggccgcggcgaatcgtgcggcaagactgttcgagttcgacatccgccacccgtacagcccgcggacgcagctgctgacattcggcgagctggtcggaaaaccgagctccaacaaggcgtacacctatgcggtcgaagggcagtcgaacgccgccgatggcgtcaatctgctgaggaaacccggcctgctcgccggggtcgctgccgcattgaagaagatctgagcaaaaagggacgcccccgctgacgggctgagtcgtcaggcattgtctgatgccaaggagcgcccccgccagcgggggcgctccactgatccgctgcgctcgacagcctgctgggctctgcgcccgtccgtcgccggcgccgtcagcgaacggagctggccttgagcagggcgtcggtcaggtatttgccggcggccatgaccagcggggcgtaacggcgcccgggcgagttgcccatacggcctgacgggccggaaatggaaatcgcggcgatgacctgaccggaggcgttgcggatcggcgcggagatggagcagacgccctcttcgcgctcgttcaccgattcggaccaaccgcgcttgcgcacggcggcgagcttcgcggcggtgaacttggcgtgcctcagcccctgatgcagccgttcggaatcttcccaggcgagcagaatctgcgcggccgacccggcctccatcgacagcatcgcgcccacgggaatcgaatcgcgcaggccgctggcgcgttccaccgcggcgatgcacacgcgctgatcgccctgacggcggtagatttgcgcggattcgccggtccggtcaagcagtgtctgcagaatcggccccgccgcggtcagcagacgatcctcgcccgctgcggcggcaagctcggcgaaacgcgagccaagcacgaatcgtccgtgctgatcgcgcagcacgaagcggtggcgctccaacgcgatagccagacggtgggcggtcggtcgcgccaggccggtggtcgacaccagctgtccgagagtcgcgggaccggattccagcgcgtccaaaatcttcacggttttgtcgagtacaccgacgccggaatggatctctccgctgatggtgtactcgatggcgtccgctgtcatggtgctggtcacggtgccgtcgtcatgcatctcgtcgtcggcacgctgtcgttcatcggccatgcttgtggccagtggttgcgtcagagaagtcataatgaagcattatgccatctcacataatgaaatgcaaaagtaacgtagacgcttttctgttaatggcaggccggtaatatcgcgatattttcgacaagaaccgcaaaaaacaagaataattcaagcatcgccgtgttttcgccgttttatggccatgtatttatctcatatatcggcctagggaagttctcgacgtgcccttgcccatacgcttattaccacataaaaagcgtgagggcaataccttgcgcgaggaaatttgaggaggtcccgaatgggaaccacattggccgagaaagtctgggccgaccatctggtgcggcaggggagcgacggcgcacccgatttgctgtacatcgacctgatgctcatgcatgaagtaacgagcccgcaggcgtttgagggtctacgcctggccgggcgcaagccgcgtcacgtcgatcagctgatcgccacagaggatcacaacacgccgacggtcgacatcgaccgcccgaacccggacaagacatccgccctgcagctgagcacgctggaaaagaactgcaaggagttcggcgtgcggctgcacccgctgggcgacgccgatcagggcatcgtccacgcgttcgccccgattctgggcctgacccagccgggcatgaccatcgtgtgcggcgactcccacacgtccacgcacggcgcgttcggcgcgctcgcgttcggcatcggcacctccgaggtcgagcacgtgatggcgacgcagacgctgagcctcaagccgttcaagacgatggcgatcaacgtgaacggcaagctgccggcggacgccaccgccaaggacattattctggcgatcatcgcgaagatcggcaccggcggcggtcagggctacgtcatcgaataccgcggcgaggcgatccgcaacctcacgatggacgaacgcatgaccgtgtgcaacatgtccatcgaggcgggcgcccgcgccggcatgatcgcgccggacgagaccacgttcgaatacctcaagggccgtccgcacgcgcccgaaggcgagctgtgggatcaggccgtcgcctactggaagacgctcaagaccgatgacgacgccgtgttcgacaaggtcgtggacatcgacgcgaccaagctcggccccttcgtgacgtggggaaccaaccccggccagggcctgccaatcaccgcgaacgtgccggagcccgacaagatcgccgacgccaccaagcgcgccgccgccgagcgggcgctgacctacatgggactcaagcccggcatgccgatcaaggacatcgccgtggacaccgtgttcatcggctcgtgcaccaacggccgtatcgacgacctgcgccaggccgcctcgatcatgaagggacaccacaaggccgagaacatccaccgcgtgctcgtcgtgcccgcgtcctcgcgcgtgcgcctgcaagcggagaaggaaggactcgacaaggtgttcgaggacttcggcgccgaatggcgcaacgctggctgctcgatgtgcctgggcatgaacccggacaagctggtgccgggtgagcgctccatctccacatcgaaccgcaacttcgaaggacgccagggcaagggctcgcgcacgcatctcgcgtcgcccgccgttgccgccgcgaccgccattcgcggcacgatctcgtcgcccgccgacctgtaaatactgcacactggctcccgctggcagcagctgtcagtcgaagactgactgagggtgggtcggagtgtcgcgcactggcgccacccccccccagtcagcaaagccgacagcttccgccagcgggggcaagaattgaaagcctgatatccatggaaaaactcaccacattgaccggcgtgggcgtgccgctgcgccgctccaacgtcgacaccgaccagatcatccccgcggtgttcctgaagcgcgtgaccaagtccggtttcgatgacgcgctgttctacgcctggcgccgcgacccgaatttcgtgctgaaccagccggaatatgccggcaaggggcagattctcgtggccggccccgaattcggcatcggctcatcgcgcgagcacgcggtgtgggcgctgcacgattacggtttccgcgtggtgatcgcgccgagcttcgccgacattttctacggcaacaccgccaagaacggcgtgctggcggccatcatgccgcaggagtccgtcgaactcctgtggaagctgctggacgaggagcccggtcgtcagatgaccgtagaccttgagcagcgcaccgtcacctgcggcgacgtgacgttgccgttcgaggtcggcgattacgtgcgctggcgcctgatgaacggctacgacgacatcgacctgacgttgcagcatgaggacgacatcgccgcctacgagaagatgcgcgccgagaagttcccgttcaagcccaagaccatccccgccaagcattgggccgaggaacccatccagtccgcccgcgagcccgaagagagcgactgggcgggcccgctgagcgaccgcggcatcatctgaccgatcgggccagcctcagccagcgatgcctttgcgccggtgttggttgagcggagtgaaacctgttaatgtcgtatccgtatatcgaccgggatgttggccggtcatgatggcatgcacgggcgtgattgtcgcccgctgcaacggaaggggcattgatggattggcatgcgtccgtgtatggttcccgctccggcggcggccagtaccgcgacttctccgacggtgatgccgacgatgacggcgtcacgtacggcgctcgcggctcgtacgccgacatggcagacgacactgccggtgccgcgccgctgacgcccttcgtcgacgacgccgaactgcgccggctcggcggcaacgccgtgtattttcgtgcgaaggacgtgctgaaatccgggcgtatgcacgacatggccgtatcgttcaacgtgccggattcgccacgtacctcgggcaccatgctgacgggtgcgtgggccaacgtacgcctgacagcgctggtcaaaggcgccgaccggtacgcggacgattaccgcgtctccgccgcgatcgacaccgacgcgggcaaggtcggccagtcatcgtgcacatgccccgcatacggccggttccggggcgtgtgcaaacatgtcatcgcgctggtcatggcgtacaacgaacatccggatgacttcgccgcggccgacgacggtaacggctccacgaacggtatcggtcgcggagccgcaggcttggttccccggcaacctgccgtgcgcacgacccgcgcgcttgacctgttcatgcggcagcaggacgacgagcgcacccgcagatcgcagagccggcagctcgacctgttgaaggaaatcggcggactggctgattccggaggtgtcgccggcgcagcccagacggcgcggttcatgcccatcgccagcgtgtcgctgcggctctccttgagtttctcgctgaacagctgcgtggcgaaattccgcatcgaagtgccgtcgcgcggcatctcctatgtggtcaaggacatcgcctcgctgctgcaatccgtgaaaaaccgcgagttcgtcgcatacggcaagaagctcgcgttcgtgcactcgcgcgacgcctttgacgagcgctcgcggaacctgctcgacgtgctctcccgcgcgcaggacatccgcgccgtcatcaacaacgacaacagcgcatactcctactattatcggcgtcagtcggatgacgcgacgctgacgttgtcggacggtgaggtcgccgaactgctcgatacgtacgtcggcaccgaagacacggtggaatacacggctccggcacggttctacgcgccgacgatgcgcgtatcagtcgtggacggcaatcccgatctcggccttgcggtggaacgcggcgacgatcccgaggcctcgaacggcagtacggcggcggccggttacgtgatacggcatgcgcagcgcgtggaacgattcattgaaggacagcgctcgcattacgtgatcgcgcggccgttttcccaagccgaatcgggcgcgggcgtggggtcgggcggtcgggcgctgctgagcgtcgatcgtgcgacgatataccggtgcgatgccgattttgcgcagaaacgggcactgctgagcctgctgtgcggtgaaaacgatcgcgaggcgatgtatctgagcgaaagtgatgtggatcgtttcgtgcgcacggtactgccgcaactggtctcccgccaggagaacgaggccgggcggtcggtcaacgccattggcgcatccgccggtccgaacgcggaggacggttccgccgcgtcatcggtctttgaccggctcgtgccgccagctgggcgtgaaaccggagttccggcgcacggcggcttgatcatcgacgtgccgcccgagctgctggcgaaaatgcgcgtgccctgcaggctcgcgttttacctcgaccgcgaccgcgccggggtgacgtgcgacgcgcaggctcattatggtgacaagcattaccacgtgtttgacggcgtcggcgtcgacgcgtccatgcgcgacaaggagatggagcgactcgcagtcgaggcgatgctccactatttcccgcgcccgtccggtgccgtggccgccatccccgagtccgatgacgaggcgatataccgtctgctgaccgaaggattggcggtgttgcgcggtttgggcgacgtgatggcgacgcccgcgttcgacggactgaccgccatgccgcgcccgacgatctccataggcctttcggtgaaatccgggctcgtggagatatcgccgatcgccgacgaaatcgacccggacgacgtgccgggcctgctggcgagctaccgtcggcgccgcagattccaccggctgcgcaacggctccttcgtcgacatgcgcaacgtggatatgtccgacgtcgacgagatcgcggatgacctgggactgcgggccgccgatctggaatccggctcgatcacggtgcccgcctatgaggcgtactatctggaccatcaggtcgacgacgacgcgaaggacgcaagcttcaccgcatacctggacggcctgcgcgtgatcgatccgtccacgtaccgcgttcccgctgcgctggtctccgtgctgaggccgtatcaggccgaggggttccgctggctcaatgccgtgtgcgacaagggattcgggggtatcctcgccgacgagatgggtttgggcaagagcgtgcagctgctgtcgctgctgcttgcacggcacaaggagtcccgggccgagcaccgtccgaatctgatcgtctgcccggcctcgctggtgtacaactgggtagccgaggtagcgaagcacactcccgagctgcgcgtggaggccatcgccggcaccaaaccggaacgtcgtgcgatgcttgacggcgtgcgcgccgcacagcaggacaccggtgtgtctccgacgcgggaatccgcaaggccggcatcggccgcggccgcgtccgacgacgttcccgacgtgctcgtcacctcgtatgacctgctgcggcgcgacatcgacgactatgcgggacttgagttctactgcatgacgctcgacgaggcacagtacatcaagaacgccgctaccaaggtgtcgaaagccgtgcgctccgtcaccgcagtgcatcgtttcgccctgaccggcactccgatcgagaatcggctgagcgagctgtggagcatcttcgatttcctgatgcccggcatgctcggctcgtacgcgcatttccgcgaacggttcgagatgccggtgctgagcggcgacgagaccgcacagaagaaactgcaatcgttcgtggggccgttcatcctgcgccgtcttaagtcgcaggtgctcaaggatctgcccgacaagatcgagaacgtcatcacagtgcagctgcagggggagcagcgcaagctgtatgcggcactggagcagcagctgcgctcggtcatcctgaggcagcgtccggccgatttcaacaccggcaaaatccagattctggcgcagctgacccgactgcggcaagtatgctgcgacccgcgactgatatacgagaacgccgacgggcatgccagtgccttgagcgcaggggtgcaatccgccgcgaaagacccacagcagtccgtgaaacagcctgtgaaacagtcgaaggcgcgcaagaccgtaagctccgcgaaactggacgccatcatcgaactggtggactcctgccgtgatgccggccgcaagatgctgatcttctcgcagttcaccagctacctcgacctgatcgcgcaacggttgcgggccgacggcgtggaatacgacatgatcaccggagcgacgccgaagaaacgccgtctggagctggtggaccggttcaacgccgacgcgacgccggtgttcctgatctcgctcaaggcgggaaacacgggcctgaacctgaccggcgcatgcgtggtcgtgcacgccgatccgtggtggaacgcggccgcgcaggatcaggccaccgatcgcgcccaccgcataggccagacacaggacgtcaacgtgtatcagatcgtggcgaaggacacgatcgaggagcgcatcctcaacctccagcgcagcaagacagacctcgcgcaacggttcgtggattccgcgtcctccgccaccggacggtcgatggccgcgctcaccaaggacgacctgctcgccctgctgggctgaaggtttttccccacgcaacagtcaattcgtcgcgataccatcggtgcttggatgttcgtaaaggaaaggacgtgatgagcgtgcgtaagaagctgatgagcgtggtcgccgcggtggcgacggccgctgccatgggcgcgaccggtgtcgctgccaatgccgctgatgttgttgccgtgccgcaggaggggctgtccgacacgggtgcgtcgatcgccatcgtcgtggtgcttgtcgtggtgctggccgcgattggcgtgggcgtcaccgtggcccggaagcgtcagagcgctacgggcgcacacgtgcagggcgagggcgagggcgccgacgagagcggactggtggccgatggtgctgatacggctgatacgcagaccgtgcagttcgatgatgccgctccggccgcggatgactctgacgccggttcgggggaatcccgcgactccgagtgattccggaataaccgcaatgtgcaaaaggccctcttcggagggccttttgcgttgacatggtgttttgccggtgtcccccccccagtcggccttacggccggtggtgccgtccgtaggcgaaggcgagctggccggcgagcgaataaggtcgcgcccgcaggacgggcgtccttgactgcagggcccgaagggctgtcgcgaagcgactgggggtggtcccacatcgtgagtgtgattcgaggtctacgatccgacgctatctgcatttcgaggggttgattcgacggccgcgaaacatctatctacgtttcgagggggtgccgaaacgtgatacctggagtattgagcgccaatcgccattggaaccatgccgttctggaggcgttcatacttggccaccaaccccctgaaacgcagatagatgtcccatgggactcgaatcaaccccttgaaagcgagatatcgccaatcaaggcttgaaaatgtcgcccacaggcatatcgggcccacatgagatgtcgacactgacgttgatgggcgatacacggcgtactgttgaaccatgagcatgaacgatcggcaacaggcccatgggcaacctgatgatgagatggaaccggaaggccggcggcagccggctgctggagacggaaaccccgaaaaactccagatgcctgccggtgacgccccgcagcaagttgggcagccgatgcaatggacggccggcgaaacgccgcagcctttgccgtattcacggcctgtgaatccgccgcaatccgtgaaccggcctcagccggtcggccactcgcagccgccggtggcgggacaatgggcaccggcttctgagccacgtccgatgcctccgattccgtcaggaacaggtcagccggggatgcgtcagccgatccagtcgtatccgccatatccgtcacagctgtacccgccataccctccgtatcctccatattcctcggcgcgacgactcgtcgcgccgcccatccctgtcgcccagcccgtcccgatcgacccggtcaaggcccgccgccgctggctgcgaggcaccgtcacccgccacgcgggcctgatattcgcctaccagggcgtgttcatgggcgtgaacgtactggcctcgttcgtcatcggcatcatactgggcctgagcggagccgcggggcgaggaacgctgacggccgagtcgctcagcgccgccctcgtgcagctgaccggcgtgatcatgctgctcacggtgctcggcggcatgggcttcatactgccgatgcgccgcaggatgatattccgtcgcgacttctggctcggcgagcccggccatgcgcgtatgaaaccatcgtggctgctgacgttcatcatcctggtcatggcgatccagacggcgatcgtcctgatccagctcggcttctcgatgttcggcaccacgttgcaatcgcccacatccgacaacatcagcgaggcctcgaccaacatttggatgtggctgtatgtcggccttgccgcgccggtcgccgaggagctggtgttccgtggcgtgctgatgcgcggcctgaagccgctcggccggaatttcgccatcgtgaccagcgcgctgatgttcggcctgttccatgacgatgtggtgcagggcctgttcgcgttcggctgcggtttgctgttcgggttcgtggcgatggagtattcgctggtgtggtcgattgtgctgcacgtgttcaacaacgccgtgctcggaggcgtgctgccgtggctggcgggcctgttcggcgacgcgggggacacggcgtatacgctgggacttttgggtgtttcgatcatcggcctgatcgtcgtgctggtgaaatacggcgggggattgcgcgcctatcggcgggtgaaccgcagtgcgccgggaacgtattgggggtggacgtcgcctgcgttcctaattttcgtgatcgtgaatgtggcgatcacgatactgtcgttcgtcaccgcgatgatgggcgtctgaccagcctggcagacggcctggcgaatgctcccggcgttgcgggtctgccgctgtttttacagtggatatatcgtcgtgtttgtggcgccggcagcggtccggcgtcggttgagtgtctggagagccatgagtgatttcgagccgttttacaacgttgacttaagttatgaggataattatgcgcgcggcccgttcggcgagttcgccgcggcgctgcgcggtgatgtgccggcctgcgaggccgcttcgccggcgaagtcgtcgttccttggcatccccgttgacctgccgttcggcattccggccgggccgctgctcaacgagcggttcaccacggccgcgttccgcatggggttcgacatcgccacgtacaagaccgtgcgctcgcgcgcgtgggggtgcaatccgttcccgaacgtgttggccgtgcacccgaccagtgccgacggctcactgacgccgggcagcgccgaactggatgagggcgtacttgcggacacggactatcgcctgccaatttccatttcgaattcgttcggtgtgccgtcccgcgacccggatgagtggcagccggacatgcgccgggccatcgcggcggccggcccggggcaggtgctgctgccgagcttccagggatcgcgcgtggagggcatgagcggcgacgactatatcgcggatcatgtcgcaaccgcacgattggtgtgcgagaccggcgccgacctcatggagatgaacacgagctgcccgaacgagggtcataatcgcctgctgtgccatgacccgcatctggtcggccgcatcaccgaggccgtcaagggcgaaatcggcgaccggcctctgatcgtcaagctggcgtatatcccgccgaccgaggtcgagggtggctgggggccggatcgccgcgtgattgacgatgccgctctggagctcatggtgcgtcagaccgccgcccgcggcacggtgcaggcgttcagcacgatcaatacgatttcggcccggctcgtcgacgcgaacggcgggcaggcgctgcccggcaaggggcgcgaccgcagcggcgtgtgcggcagcgcgattcgcggggcaggccttgacatggtgtcgcgtcttgcggcgattcgcgagcggctggggcttgactatgcgatcatcggcgtgggcggtgtcgtggcaccagaggattaccgggcgtaccgcgcggccggcgccgatgcggtgatgagcgctaccggcgcgatgtgggatgccgagctggcccgcaagatcaaggcggatgactgatccgctgtatcagcgaatcgttctcaatagcgtttgtgcgagtactcctcacatttgcgaacaaaacgaacatcggcttactcgttggaatatcggccatatgcatacaatcatgttcgttttgccgacgacgggactcgcacgtttcttattgagaaccattcgctgcgacatggtaatcggcttccggcgcatttcacgtgcccgccacatgccgtatggcaaactaatggatgtgatgtccggggtggcccggcgaatgaataggagtgttgaggatggcggaatcggagaacgatgtcctgcatgtggtcggcggcaaaccgctgaacggcacgatcaaggtgcgtggcgcgaagaacttcgtgagcaaggcgatggtcgcggcgctgctcgcccccggcaaatcggtgctgaagaacgtgcccgagattcgcgatgtgcatgtggtgtccgatctgctgcgcctgcatggcgtggatgtggaggtggatggcaccaacggcatcgtcaacatcgacgcgacgcatgtgcagctcgccgatgtggcggatgtcgacacgctgtccggctcttcgcgcattccgatcctgttctccggcccgctggtgcatcgtctcggcgaggcgttcatcccggcgctgggaggttgcgcgatcggcggccgtccgattgatttccatctggaaacgctgcgcaagctgggtgccacggtcgacaaggagcacaaggacggcattcacatcaccgctccgaacggcctgcacggcgcgaagatccatctgccgtacccgtccgtgggcgcgaccgagcagacgctgctggccgccgtgctcgccgaaggcaagaccgagctgtcgggtgccgcaatcgagcccgagatcatggatctggtggccgtgctgcagaagatgggcgcgatcatttcggtggatgtggatcgcacgttccgcatcgagggcgtcaaggagctcaatggcttcacgcacacgtcgctgaccgaccgcatcgaggccgccagctgggcgtcggcggcgctcgccacgcgcggcgacattttcgtcaagggtgctacgcagccggagatgatgacgttcctcaacgtgttccgcaaggtcggcggcaagttcgaggtgaccgacaggggcatccgtttctggcatccgggcggcgacctcaagcccgtggctatcgagacggatgtgcaccccggtttcatgaccgactggcagcagccgctggtcgtggcgctcacccaggcgaatggcctgtcgattgtgcacgagaccgtgtatgagaaccgattcggcttcaccaagccgcttgtgcagatgggtgcgacgattcagctgtatcgcgagtgcctcggctcgctgccgtgccgtttccagcagcgcaactacaagcattccgctgtgattttcggaccgaccccgttgaccggccgcgatatcgacgtgccggatctgcgtggcggtttcagccatctgattgcggcgcttgccgcgtccggcccgtccaatgtgcatggcatttcgctgattgaccgcggctacgcggatttccgcggcaagctcgccgcgctcggtgccgatttcgagtaacggtacagagagcctgtagggccccgatttccgctgaaggaatcggggccttctctgtgactgattatggtcgatgaaaaggatgccccgccgtcgtcagtcgtcgaagtgcgcgaacagcgacgcggacagcaacgccatagcgatgagcactgcgcctgacgcgatgaatatcgcggcggcggggagatgatcgaacgcccagccgtacgccatctgcccgagcggctgcatgcacatggccagcgcagacagcagcgccatcactttaccgagcatcgcatcgggcgtgcgcatttggattgcgggcacggcgatgatattcgcgcatgagcagatgacatcgccgatgcaggcgaaggccacgagcgccatcagccgcgtccagttgccgccagacagcatgcaggccacgccttgggggatgacggtcagtccgagcaatgtcaggatcttcgtcatatggccaattttcagccgtccggccatcatcgtcacgatgagcatgcccatcagggccgcgacgctgatcagtccgtcggcaatgccgtagacggtcgcgtcgaacccccattgcgtgcggatgacgaacgcgtatccgacggcgccatagccgagtacgacgaagttcagcgcggaggcgagcaggaccattttcagcaggttcggtttttcccgggtcaggaaccgcagagcggccttgaggtcgtcgagcggcgtcggcatctcctcgtcgcgttcgggcataccaagccggatgaagcattcgatggccgccgcgccggcgaatgccgccacggagacggccatcatcggccggatgccgaagaacgagtacacggcgcctccgaggaagctgggtatcagtgcgctgacctgctgcacctgactgactatcgcggcgctggtgttcagcgtcgcatccccgtattggcgcagcatctgcggcagcgcggattcgacggtcggcgtctcgaagataccgagcagcgatagcgccacctgcattacgcccacggcgatgatgctgaatccggcggcggagaaccagacgagcgcgagcgcgaccgtcacggcggacgccgcgtcgaggatgaccatgagcgtgcggcggttcatccggtcggccaacacgccgccgaacggggcgccgaggatcatcggcacgaacgatatggcgaggatggatgcgaatgcggttgctgagccggtctcgtccagcacccacatcgacatggcgaagcgcagcatcatgttgccgaacagcgagatgccttgcccggcgacgagcaggatgaaattgcgggagcgcagcggatgcgcggcctttggctgcgcttgcgtgcggttgcggttcgggggaagtgttgggttgctctgtttcgtgctgtgccgcgggaagctgtgtttcggagggttgtaccggtgtggtgggcatggtgggttcctttgctgctggtggcgagttggtctcggtgttttgcgttggtggatttggcgtgagtttgatggatggcacggcaatgtattggggcggacgattttgacgccggagttggtggttcatcggcaatcattcataccgactgacggtatgtaaatcggtgctggagcaggggcgaaacattcgtgccgcgtcctgccccggagtcagtgtcgtctagtgtgcgtcgcttaccggactggtgccgcctccgtcttgttgctcggcggcgctgccgctgccgtcgccggcgaaggccatcatgccgtccgtggcgagatcgatgagatgctggtcgaagaccggcgcgtgcagcgcgtcgagcatggtggcgaggcattgcagacgatgccgcagctgcgtgcgcgtggcggggaagaagcatggcatcagccaatagttgcatagcagggccagcagctgtgccacttcgcgcgggtattcggtggggatggagccgtccagctggccttcctcgatcaatggctcgaagtttttcggcagctcggttgaccagaatcgcatgttggcggtgaatgtggcgggatcgtcgaagaacggcacggtggccttgacgggcgccaggtgcgcggcgtctcccagcgagttggcgaacagcgagcggagcttttccatcgcgttcatgtcgtcgcgtttcgcgatctcgtcgcacagggcctggctggcgtgccagtcgtcggtgttcagtcgttcgaggatggcctctttggacttgaattggtggtagatcgcgcctctcgacaggtctcccagcttatcgatgatgtcctggatggaggtcttgtcgtagcctttctcggcgaacagctttttcgcggcggcgaggatgcggcgttccgtcacctcggggtgcgggttgcgtgccatggttcctcctttcgatatgtcatcagtatacataccgacagtcggtatgtatgactgcgtgtcatgattgcggccgtctgtagggccttttcggggtggcggcatcgcgcaaaatgggcaaaaccgtattagatatcggttatatgctatgttggtcaatgttgggcgttggcgcttgaccgaacgaaagaaggcacatatgacagatcccaatgccggtttccccactggaaacaactcttatggagccccgcagcccgctcagccggcttcggacgcaaacgcggcctatcagcagccgcagtacaccgcacccgtgccgcctgcccagcccgtgccgcctgcaggggcaccctatcaggcgccggcaacccccgattacgcggcgaacatccagaactccgtcgccggtttcgcccagaacctgggtggcaagaacgtgaccgtcggaggccagtcattcgacttcatttccatcatcacctacgtggccggcgtgctggcgatcatcgcctgcatcgtgccgttcgtgtcggcgtttggatacagcgccagcctgttccaaggcggggacggatggattgtcctcgttgcggttcttgccatcgcggcgctcacgttcttcaagaagcacctccccgcaatgatcatttccgccttggtgctggtactcagcatctttgagatggtgtattccaagatcaagatcaacagtagcttggacgagttcggcagcaactatggcagtctgggaagtctcgcgtccggctacgcgaagaatgcggtggctttcggtattggtgcatacttgctcatcatcgcggcgctgggcctgattgtcggcaccgtgcttgcgttcggcaatcagaagaaggccgcgaaggtcgcggtgccgggtgtttccgcccagccgcagtatgtgccgacggcattccccggtgctccggtcccggcacctgccgcccctgtgtccgatgccggcgttcctcaggctcccactgcaccgcaggccccgaccgcaccggtcgcctcgactgcgtatgagcagccggcgcctgccgctccggtttaccagcagcccgattcggacgcttcctacccggggcagaccccgcaggcctgatttctaggtcttccgcgttccgcgcctgatcggcgtgaagcgtgaccaatgagccgctgtgcacatgcatagcggctcttcacatatgcgacggatccgagcccaatgaccctgccgataatccgggaaatatgaacggccgcacgcacccgcgatgccgcgatattgtccgctctcataggcataatagaaaagttgtgtctggaggatacgtgtatgcgaatccgctagcacagcacagcaatatacgttgcgggaggaatccgccgcgggcgaccgccgcgggtgccgacatcaccgcttcatagaaagaagaaccatacaatggctcccaagaagaaagtctcggcgctgatcaagctccagatccaggctggcaaggccaatcctgccccgccgctgggtccggctctgggttcgcatggcgtgaacatcatggacttctgcaagcagtacaatgcgcagacgcaggacaagatgggtcaggtcatccctgttgagatcaccgtttacgaggatcgctccttcaccttcattctgaagaccccgcctgcagcggctctgctgctcaaggccgccggtatccagaagggcaccgaaaacccgctgacccacaaggtcggctccgtcaccaaggcgcagctgcgcgagatcgccgagatcaagatggctgatctgtccgcccgcgacgtcgaggctggcatgaagatcatcgcgggcaccgctcgctcgatgggcatcacggttatcgactgagaggagaaggacacatggttaagcgttccaagaagtaccgcgaagcggctgagaaggtcgatcgcaacaacctttacaccgccaacgaggctatcgctctgctcaagtccatgccggcctacaacttcgaccagaccgtcgaagccgtgtaccgtctgagcgtggatccgcgcaaggccgaccagctggttcgtggcaccgtcaacctgcctcacggcactggtaagaccgccaaggtcgccgtgttcgcccgtggcccgaaggccaccgaggctgtcgaggccggcgccgacatcgtcggtgacgacgacctgatcgagaaggtccagaacggcttcctcgacttcgacgccgtcgtggccaccccggacatgatgggcaaggtcggtcgtctgggccgcgtgctcggcccccgtggcctgatgccgaacccgaagaccggcaccgtgaccatggacgtcaccaaggccgtcaaggacatcaagggcggcaagatcgagttccgcgtggacaagaacggcaacctgagcttcctcatcggcaagctctccttcgacgagaccgctctggacgagaacttcaaggccgttgccgacgaagtcaagcgtctgaagccggccaccgtcaagggccgttacatcacgaaggtgaccatcacctccacgatgaaccccggcgtcccggtcgatccggtggctctcgcctgatcaacgccaatcggctcaaccttcataggggcttcccgcacgcgcgggaagcccctatgtcgtatttcgattccctactagactccccagtttcgctgcgcttgacagccagcgggggcaaagtaaaccgcccgccgctggcgggggctgtcagtctttgactgactgggggtggttcttgccgccgcatatacaaaagccgcccggcacacacatgcgccgggcggctttcagctactgtcgcggtcgcctgtcagtaggcggccagaatatcgaccacgaagatcagcgtggagttcgcggggatggagccctgggcggtgtcgccgtaacccaagttcggcggaatcaccattagcacctgcgagccgatcgtctggccgaccatggcctgctgccagccctcaatcacctgatggttgccgccgctgtacgtgtcggcctcaagcgtggtgttcttgtcccatgacgagtcgaactgggtgccgtccaacagccatccggtgtacttcaccttgacggtgttgttgttcgtgacctttttgcccttgcccttgatcagcgcctgcgagaccagcttgctgcttcccttgtacccgttcatgttgatggacggcttgccgttcttcgctcgcgtgaccttcggcagatcggacgggatgtcggtgacttcgtcgcctgtggccttggtgagatccttcgacttggaaacgtaggtcagcgccatgatgtacgacgtgccgttggagttggagtcattgacgccgtacgcgatcgtcgtgttgagcttgcggcccttcagcagctcatagtaggcgtcgctcaccgtgcccttttccagcaccagggagcaatcgggtgtgttcttctcccagctgctcgcaagctcggtgccatccttgacgctgatggcgatgccctgcgagcacagacggtcgccatcagcgatagtggcgccgttgccttcctgcagcacggcatagctgttgttgtcgacggtcttcggtgccttgaaggagaccttcggtttctcgcccagcgtacccgtggcggtgatgccggcgatcttcttcatgttcttcaatgcgctggagtcggaggactgcgaggagtcgtcgccggatttctttgacgacgagccggaatcgccggagccgcacgcggcgagtgtgacgcacaggccgaccgtgcacacggccgcgagtacgcgcttgaacgtggatgtctgtgtcaacttacgcatggtcaccacactagcggaaaaccctgatttttctttggaaacgtctttttcgccggggctttatgccctgcattgtagaatgggtgagttatgaagaaacagacatcaaaagagcgcaagcgtgacgagcgaaagtccaagtcggccgcccgtccgacgcgccatgcccgcatcatgcggggcgtggtgacgcccatccttggtcttctggctgtggcatgcattggtctgggcattatgaacgccacatattggaagcccagctctcagatcgcggccagtgccgcggtgaaggggacgcaatatatcgttaccgatcccggcgtgctgccgctggtggacaatcaggtgacggtttccgccgatgccggttcgtccgacagggaagtatgccttgctctggggtcgaacaaagatgtgatcggttggctcgccgggcagccatatgtgcgcgtcaccggcttgaacgaatggacgacgctcgcgacgacgaaggtctccgcgcaggggtctgcggccgatgcgggcgatgacgcagtggcgttcaaggactccgatatgtggacttccgtgacgtgcgggacgggcaccgtgaaagcggagaccaaggtcgcgtccgacagcggtaccgtagccatcatcgacttgggcaagtcctcgaacgcgacggtgcgcatgaactgggtgcgtcagactctacctgatttcgccatgccgttctatttcgccggaggactgctggcgctgctggccgtactggccgcatccctgttcgccatgccgccgcacaagcgtcgcaagcgcgtggtgagtggttccgcagccgaaaagcaggcagaggaggtcgccgtttcgcaggcggtggcgggcagtgtcgcgagtctcaaggcggcggtcagtttcaagccgaaatccaagcgccgccgtcatgccgcgcatcgtgggaaacccggtgcgggcacgccggcaaagccggaaatctcccagccgaaggtcgtcgatcccggcagccgcaaccttgtcgccgaccagcagaacgcgcaggccatggaccagcccgacgattcggcgacgtcggtaatcaccgccagcgagctgcagacgtatttcgcgcggctttcgcaggaatccgatgatgacacgaaggggagctccaatgaataaacgcataaccaccgccctggcggcgacgatggtctgcgctctgacgctcggccttgcaggctgcgaggggcaggtgccacagaccgtggcgccgtcggtgaaggacaacgagatcatcgatgtgaccgtcgcacaggagaagcagatccgcgggaagatccttgacgtgctgaaccaggcgaacgaggcgaaaagcgccgacgggctcgccgcgcgcgtgtccggctcgcaactggagatccgcaccgcccaattgaacattgcgcaatacacgcagcaggatgtcacgccgttggcgactatccccagtgatgtgacgcaggtggtcatcccgaccgacaacgcatggccgaggtatattttcaccgtcaccaccaccaccgaggaccagcaggcgaagcgtctgctggtgatgcggcaggagtccgcccgacagaactacaagctgtgggctgtcgcccgactgcttgaggacgtgtcactgccgggcttcgcgcccgctaagcagggcaatgtcatgggcgatgccaacgactccaatctggtcatgacccccaagcaggcggtgcagcgatacgccgatgtgctgcagaacaacacgaacagcaaatacgcgggaagcttcgaggatgaccagttccgccagtcgctagtcaagcagcaggaagaaagccagaagggtgtgacccagaacaagggcacgcagcaggaggtgttcgcgccggtcgtcgaccagatcgccgtgatgcgctcccctcgtggcggtgacctggtcgtcgcgcagatcaactcggagtggacacggtccatgagcgagggccgtgagtcgttgccggggtccccgaacgaggatgcgctgttcaagatgacgaatcagaaggccaccagttcgctgaaagccacttatgtgaacgttgtggcgatatttgtgccgctggccgggtcggatcagaaggtgaccgtggtggcgggcgatcgtcaggcggtcaaggtcgaggcgcagtagacgccggactcgggccggcgtcgggccggcgcgcggacttgccaagcaccggaatcgggcgcttgcagcgtaaccggaggcggtgagacgccgtggcctatatagtggtatgcgtcaacgatgttcgcgacggaatcgacggtggtcgcaggtatgcggccgcgccgattttcgcgcggcatggatgtgacggaacggcgtgcggcgcagaccgcgggccggtatgagtcgtgaaaacggaggcatgatggcacagcagcaggagtttcatccgggattgtcactcgcgggcgcggtggatctcgaatcgttgaagcatcaggtgaaggcggagccggggcaggccgggggagcgccggccgcgggtggctatgtcatcgacacgaccgagaacacgttccaggcgatggtgcagacctccgccacgttcccgatcctgctgctgctgtggatcccgaccgatgaccgtctgttcccgatggcccgtacgctcggcgacgcggtgaacaagctcaaggggcagattcagctgtcccgcatcgacatcgcaagctacccatcgatcgcgcaggcgttccaggtgcagggcgcaccggcgctgttcgcgctgatcggtggccgcccaatgccgattcttcaggggctgccgggcgatgacgagctgaagcagatcgtcgatcaggtcatccccaagctaatttcggtggccgcgcagtccggcgtgaacggtactgcgccgtattccggcgacccggactcggccgacggtgacggtgctggtgccggtgacggcgcaggtgcggcggctggtgccgacgtggtgccgcccgagcatcaggaagcgcaccagcttgcggcgcagggcgattacgccggtgccgccgcggcctacgagcaggtgttgcaggcgaaccccaatgacacgctcgccgcgcgggagcgcgcgaaggcgctgctgttggcgcgttcggcgaccgctgacgtgcgcgaggtacgcaaagccgccgcagatcgtcccgatgacgtcgaagcgcagctggccgtggcggatgtggacatgatcggcggccagatcgaggacgccttctcccgtctgctggattatctggcggacggtcacaccgatcaggtcgagccggtacgtaagcgtctgctggagtacttcatgattcccgaagcgaccgatgagcgcgtcaagcgtgcccgtcgccgccttgccacgctgatgtactgagcgccatcgcgccaaaatatgtcattatgctgaaaccgccgcggtgccaattcttgcatcgtggcggtttcagcggttttgggcctgtggtctacgccttatagtcccatgcggttacggccaaactgggtttggaatcggggcccgtcccggtgcagctcggcgtcgaagtccgcggcccactgcgagaacggccgcgaagccagtccgtcgttgctgaaccgcgcctgatcggtgatctccgtcacgcagaacgatggaatctgcagattggtcacgggtccgctacgctccgcctcggcgacgaccagcggggcgttcgcgccgccaaatatgtcgaggctccatccgtcctcgccgatccatgcggagaaccggttcttgataatcggacagcctccgcgcatcaccagttccgcggctatgcgggcgtcgatctcccgttcggcctcataacgggtgccgcccaccgacggccccttgacggtgacgaacgcctcggtgaaccggtctcggtattgcctcagtacggctatcggatcggtgtcggcgttcatatcgatgcgcaccccgtgtgtctgtagccgcactcgcaacgcgtaattaccgtcgtgcacataatagctctgcacgatcagcatcggctcgccgtcatccagttccggcggcagcgccctgcagaagaaccgacgttcatattcgaaatcgttcatggcgatgtccataccactccagtgtagtcggtgcgggagcgcgtaaacccgggaattccgcgaaattgtcgacatgttgggagtgggatggtgtacagtaatacagttgcttgccgcaaggcgagcgatgtctcgggttcgtagctcagtggatagagcgtctgtctccggaacagaaggtcgagggttcgaatcccttcgagcccaccagcaaaggttccataccatcggcatggagccttttttcgtggtctatctgcgtttcgagggggtgattcgggatgcgccggacatctatctacgtttcgaggggttgatagccaagtataaacgctacgggaaccgcatgattccagcaagaaacaggtcggaatactccgcatatcgtgttctggcaaccccttgaaacgcagatagatgtccccagactgcaaaatcaccccctcgaaacgcagataggagatgttgcggcgaaagccggtcgcggcggttgtctccgcctcgcgaccggtcagctcttcttgggggcggtggtgctttcgcggacgaccaggcgtgtgggcaggatcaggtagtggtcggcgacggagcctgcacgcgcgtcgagaatcatgtccacggccttgcgggcgatcatgtcgaacggctggctgatggtggtgagcgccgggtacaggtattgtgccgggtacacgttgtcgaagccgacgaccgacaggtcagcgggcagggacaagccgcgttggcgggcagcgcggtacacgttgagcgccgtgacgtcgttgcatgcgaagatcgcagtcggccgtttggcggcgggcaggtcgagcagttggcatgcgcactcatagccgcgttccggcatgtagtcgccgtaggcgaccagctcgggatccagctggatcccggcgcgacgcagcgcggtggcgtagccactgtagcgggcctgagcggattctgcgttctgcgggccggtgatgatgccgatgcgctgatggccgagtttgatgaggtgctcggtggcgatcagcccgccggtccagttgtcgatgcccacgccgagcgtgtcctgcgacccttcgccgatggagtcgataatgacgaagggaatgttgcgcgaacgcaatagtgttttttcgcgttcggtcgcgttggacagcagcaaaatgacgccgaggggattgcggttgaggatttcccggaagctttcctcgctgcgcttgccccgcccggtctgcgtgatggtgatgccgatgggcatcgattttacatattcggaggtctccgcgatcatcgcgttgataccgttcgccatgacctcggtgagcacgagctcgatggtctgtgatgtcttcgtggtgacgagagacttggagtacccggattcctccatgattttctcgatgcgcgcccttgtggagctggatacgccctctcgcccgttgatgacctttgatacggtcgcggtggagactccggcaagcttcgctatctcactgacccgcggttttttcatatcgcctgccatcggttgctccgtttctcccgtacttcattgtgggtgtgtctgcgttcgttgcagacgcacttcacactatagtaaagcgtttcgagatagatgaaagaaaatttctagaataagtggtgatctttctaagaaatatgtatgatgggaacgaaacacaatacatcgagaaccattgaggcgaaggagccaacatgagcaccatcatcggagtcaaaacctacgacctgcgtttccctacgtccagcacgttgtcggactcggacgcgatgaacaaggaccccgattatcctcggcatacgtcgtcatcaccaccgacgcggatgacggcctgagcggcggcggcttcgtcttcactgtcggccgtggcaacgacgtggtcgtggctggcatcgactcgctctcccgcatgctcgtcggccgcaacgtcgagaacctgctcgacgacatgcgcgccgcatgggacatgttcgtccacgactctcagctgcgctggctcggcccggaggagggcgtcgagcacatggccatcggcgccgtgctcagcgcgccatcgacccgatcgcggccgccaccggcgagcagatgcagaaccgcatcatgtacaagcagtatctgcaggcgggcagcttcaaggtcatgcagatcgacgccacgcgcgtcgccgggccgcaggagatcgtgctcgaatacctgctcgccaacaagttcggcgtgcgcgtgtgccccccccacgccggcggtgtcggcctgtgcgaggtggtgcgtcacttcgccatgttcgattacctggcgatcagtggacaatgggatgatcgcgtcatcgaatatgtggacaaccagcacgaatacttcgtgcatcccactgagatcgtcaatggtcgttacaaggccccgaccgctccgggctcgggcgtcgacatgaaactcgaagccgccgaacggtacctgtacaagggctgatcgaagcaccgcggtgccgcggctcgcacggacacgaacgcaacaaaggacactgaaacatcatggatttgcatctggaaggcaaggttgtcatcctcaccggcggtttcaagggcatcggcaagggcatcgccctgcgactggccaaggagggggccatcgtggcggttatcaaccgcgacgacggcgccgccgagcagttcgacgccgaaatgaaggccatcaccgacaactaccgcacgtatctgatggatctcaacgacaccgacgacatcgcgccgatcgtcgaggatgtggtgaagacctacggccatatcgacggtctggtcaacaacgcgggccgcaacgacaacctcgacctcgaccacacctcgtggcgcgaattcgagcagtcgctgcacggcaacctcacgcactattacgagctcgcccaccgctgcgccccgtacctgcgcgaatcgaagggcgcgatcgtcgacatctcgtccaagaccgcgctgaccggccagggcaagaccagcgcctacgccgccaacttgctcgtgttcgacgcctccaagggcgtccacttccacgacgaggtcttcaaggacaccgtctacttcatgaacaacgtgttctgcaacacctccaccacgccgacgcagtggtaccgcaagaccgacgcgctcgccaaggccgcgttctcgaacaacgactactacgaggccggcggcaaggcttcggacacccagcctgaggacaagcgtggtctggaagtcgacccgaagttcgtcggcttctccggcggctccgacaccccggccggcaagctcgccggcgtggcgccgaagccaaggccaacctcgacaaggcatacacctcctccaagctgcgcgtgagcctcgactccgtcaaggccggcgtgcagtgggcgccgacgatgagcgagatccaggtgcacaacggctccggttctgcctcctcgcacaagccggctgtcgccgtcgtcaacagcaacttcaacaagcaggctcctgagacgctgcccgagtacaccgtcacgctggacggtgacaagctgcagtccatccgctggatcggctccgaaggcaacgtgctgagcagcctcgacgagggagactacacggtgagcggcgagggtgacaaggtcacggtgaagatcgccgccgacttcctcaagggcaaggacgcgggcaactacggtctgcagttcgagtttgcgtccgtcgccccccgcaaggtgtcgctgaacgtgaccgacgaggcagtcgagccaagcaagccgacgactccggccaagccgggcgctaacgagcagccgaagaccgaaggcgtcgcgaagaccggttcgtccgtgcccgccgtcgccgccggcaccacgatgatcgtccgcaagcgtgccactcgctgaatgacacgccgtaaaggccggggccggtaactatgtgccggctccggcctttgccggtacgatggatataatggatgtcttgccgttgcgataacgccgcggcagacaaaatagaagaaacgttccagagcacagaaaggaacattgatgtcaacttctggccgttttacgattccgagtgaatcgaacttcgcggagaagaccgcggaactggcccggttgtggggtgccgacgcggttcgcaactcggatggcacgcagttggacgacgaggtcgtggcgctgggtatgaaggtctacacggcctacttcccgacccgcgcgcacaacgagtggatcacgctgcacatggacgagaccccgcaggtgtacctgctgtcgaagcgtgcgctggcggagagcgacacggtggacgtgtctctgatggacggtttcttcgaggagcagctcaagccgaacttcgacgccgacccgcacaagtactgggaagtcgtggaccgttcgacgggcgccgtggtgccgaccgagcagtggaccgtggacgccgaagcgggcgtagtgcacgtcttcggcgcggaactgatgcacgagtacacggtctcgttcctcgcgtacatcatctgggatccggtcgagatgtacaaccacctgacgaacgggtggggcgacaaggagcacgagattccgttcgatatctaccacccggcgacgcgcaagttcgtgttcgacacgttcgagcagtggctcaaggacaacccgcaggtggatgtcgtgcgtttcacgacgttcttctaccagttcacgctgctgttcgaccagaagcagcgcgagaaggtcgtggactggttcggctgcgcctgcaccgtgagcccggccgcgctcgacgacttcgagaaggagtacggctaccgcctgcgccccgaagacttcgtagatggcggcgcctataactctgcgtggcgcgtgccgcgcaaggcccaacgcgactggatcgacttcctctccggtttcgttcgcaccaatgtcaagaagctcgccgacatgtcgcacgaggccggcaaggaagcgatgatgttcctgggtgaccagtggatcggtaccgagccgtacaaggatggtttcgaggatctgggcctggatgctgtcgtcggttcgatcggtgacggcaccacgacccgcatgatcgcggacatcccgggcgtgaagtacacggagggtcgtttcctgccgtatttcttccccgacacgttctacgagggcaacgacccgagcatcgaggcatgggacaactggcgcaaggcccgtcgtgccatcctgcgttccccgatcgcccgcatgggctacggcggatacctgtcgctggccgcgaagttcccgaagttcgtggacgcggtggagcacatctcggatgagttccgcgacatccacgaccgcaccgacggcgaggcggcccgcggcgtgctcaacgtggcgatcctgaactgctggggcaagatgcgttcgtggatggcctacacggtcgcccacgcactgccgaacaagcagacgtattcgtattacggcattctggagtcgctgtcgggcatgcgcgtgaacgtgcggttcatcagcttcgatgacgtgctggagcatggcgtcgccgacgacatcgacgtgatcgtgaccggtggcccggtcgacaccgcgttctccggtggctcggtgtgggccgaggagccgcgccttgcggcgacgctgcgtgcctgggtgcacggcggcggcgccctgattggcgtgggccagccgagcgcccagcagttccagggtcgtttcttccagctggccgatgtgctgggtgtggacgaggagcgtcaccagacgctgtcggtggacaagtacttcccggccgtcacgccggagcacttcatcaccgccgacgtgcatctgggcgaaggtgtgctgcagggcttcctcgacgccggataccgcaagcccctgtcgggctgcggcggcggtcaggcgatcggcgagcttggcggcatcgacttcggcgagccgatcgcggacacgttcccggtcaacgaggatgtgacgctgctgcgcgccgatggcggtcaggtgcagctcgcggtcaacgagtacggcaagggccgcggcgtatacgtctccggtctgccctactcggccgcgaacgcccgtctgctggagcgtgccctgttctgggcctcccacaacgagggcaagtatgcggcatacagctcgtcgaaccccgagtgcgaggtcgcggtgttcgacaagtcgggttgctactgcgttgtcaacaacacggatcgcgcgcagtccacgtatgtggagcgtggcgacggtcgcatcgagcgcatcgaactggcgcccagcggtatcgcctggcgcaccatctgatccggtcgcatcatcgctccggatcggcgtgaacgagtgaatatcggggtcatcgtcgcctactccttcgacgatgaccccgatttttcatgccgcctgtccattgtgcgtacatgtacgcatcaccggatgggcggcataggtatatttattacacggtaagcgtgcacaagcgcgtcgcaacgcagacaataatcgcggatacccgcggggaatgaggagtcatgagcgagaagatggaagcggtcgccacgtcggaggcgcctgtggcgctgggcgcgtacagccaggcggtaaaggccaacgggttcgtgttcgtgtccggccagctgggcatcgaccccacgaccggcgaactggccggagacaccgccggtgagcagaccgcccaggcgctgaagaacatcaagcagattctcgacacggccggcaccggcatcgagcacgtcgtgcgcgcgacgatctacatgaagaacgtcgaagacttcaaggaagtcgatgcccggtacgccgacgtgttcatcggctccgtcaagcccgcccgcgttgccatcggcggcaacgacatccccaagggcgccctcgtcgagatcgacgccatcgcagttctgtgacggttcgcggggaatccgaacagtaacccgccttcaaccaaagccgtagcagtgagcctccaccagatgcatgatggaggctcactgctgtgagtcgtattgcataaccatgttgcgccgatgctgatggttccgtcggatgtggcgtatatgaaggtgatttgcgtccgtaagtgcgcgccgaaacgacgaccgtgcgcacttacggacgcaaatcgggccttttgcgtccatatgttcgcgcacttgtcgtttcggcgcgcacttacggacgctttgggagcgcccccaatctcgctccgctcgacagccccctgtcagcgggagtgcggccaacgctcccgctggcggggctgtcgcaaagcgactggggcggttcacacgtgacacgctatatagagtcatcaaacgtgtcttccaaatcatctccggccaatccaccgcatatgtgatgcggtggtgaaggagtgacgcggatcaccctgattcttaccctcgaatgccccgaacacagctgcgcggcctatgatgacctgcaccaatggcgttggcgcgactatgtcgcgcggcgaaatatggaagcggggtgtgagatgcacgggcgcgaaggacgaggacggctgtccgaatccgttgtggcggtggtttccgtactggcatgtatcgccatgcttgccggattggtgatgggcacgacgcatgtggtcggctgggtgttcgatgcgatcggactggcgtcgccacagcaccgcccgatcgtcatcgcgcatcgtggcgacacccggcatgctcccgagaactcgctggcttccattcgcgccgcaaagcagaacggcgccgatttcgccgaaatcgacgtgcggctgaccaaagacggcatacccgtggtgttccatgaccgcagaaccgggcgtctggacgcgggcggtcgcgacgtgctggtgaacagtatgccgttgtccgcattgcagcgcatgatcatgcagcaacgcggcatgcggtattcggttcccacgctgcgtcaggcgttggacgacgcttccatgtcacgtccggggcagcggcggttcggcttgctgctggacatcaagacggacgcgcggtatgcccggaaagtggctgatgccgtggtgcgtgtggtcgaggattccaaatacgccggcaatctgatggtgatgtcggccaatccgtatgcggtgatggtcttcaagagcatgcgtccgcagtggcatgtaggcctgtgcgccagcggcaggcccgatctgacgcaatgggatgatgacggcacgagcgaagcgcggttcatggacggggccgcgcgggtcgagaccgtacgccgcgaagtgacggcgaagcgcggcggaaagcagcgaaagcatcccatgttccgtggaatgcgcggcgaggccatggacttcgtcgtgttccgcgcgcgggacgtcacatcaagactgctgcggaatgcgcggctgcgcagaattcccgtatatgtcgactcggtggattcatacgatgccgcgaacggcctgctgcgccacggtgtcagcggactgctcggcgagaacatcacgccgttgcagcaggcttgttcgtcatatcacgggcttcccgaaccgttctcgtcgccggacgatgacgatcgctcccaggcgtgacgccggccgatcccgcgtcggtgcatgaaccggacgttcgctgtcaaagtgcccggtacactagggagaatgagtcctgaagcgcttagtgaactgattgaaaccattgcccacgatctggtcgccgccggaaaagccggtaccctgaccgacgatttgattcctgaaaccgccaaattcgccgtgatgcgcccgaaggatcgcgcgcacggcgattgggcctccaacgccgccatgcagctggccaagaaggccggcatgaagccgcgcgatttggccgagctgttcgccgagcggctgaccgccgccgacggcatctcgaccgtcgaggtggcggggcccggcttcatcaacatcacgctggattccgcctccgccgccgcggtggtcgacaaggtgctggccgatggcgcaggctacggcaagaacgcgcacctcggcggcaagacgctcaacctggagttcgtctccgccaacccgaccggcccgattcacatcggcggcacccgttgggccgccgtcggcgactcgatggcccgcgtgctggaggccaacggtgccaaggttgtgcgcgaatactacttcaacgatcacggcgagcagatcaaccgtttcgcaaagtccctggtcgcagtcgcgcacggcgaggagacgcccattgacggatacaagggcaagtacatcaacgagatcgccgaccgcgtgatcgccgaggcggaggccgatggcgtggatgtgctgggcctgccgcgcgtcgacggcggcctcgacaaggacggcaacccgctcggcgagggcgattccgagcagcgcgaggagttccgcaagcgtgccgtgccgatgatgttcgacgagattcagcgctcgatgaaggaattccgagtccgcttcgacgtgtggttccacgagaacaacctatacaaggacggagaagtcgaccgcgcgattgaggagctgcgcagtcgcggcgacatcttcgagaaggatggagccacctggtttgaatccaccaagcatggcgatgacaaggaccgcgtcatcatcaagtcgaacggtgacttcgcctacttcgctgccgacatcgcctactactggaacaagcgtcaccgcgctgtggatccggccgacgtggcgatttacatgctcggcgccgaccatcatggctatatcggtcgtatgatggccatgtgcgccgccttcggcgacgagccgggcgtgaacatgcagattctcatcggccagctggtcaatgtgatgaagaacggcaagcccgtacgcatgtctaagcgcgctggcaacgtcgtcaccatcgacgatctggttgaggccgttggcgtggatgcggcccgttactcgttggcccgtaccgactacaacacgtcggtggatatcgatctggatctgctgacttcgcattccaatgagaacccggtgtactacgtgcagtatgcgcacgcgcgttcctgcaatgtggaccgcaacgcggccgctgcgggcatcggtaccgaaggcgctgacctgagcctgcttgacaccgaggcggacggcgaggtgctcgccgcgctcgcccagtggccggcgactttggctctggccggcgaccagcgtgccccgcacaaggtggcgcactatctggaggacctggccggtgcctaccacaagtggtacaacgtcgagcgcgtggttccgatggcgctgaccgaccccgaggagcgtctggatgacgccgctcgcgaggcactgcgcatcgccaagaaccccgaaccggcacgtgccgccgcacgcctcaagctcaacgacgccgtgcgcacggtcatcgcctccggtctcgacctgctcggcgtcaccgcccccgacaagatgtgacctaggctgcccctggtcgcgcgtagcgcgactgggggcggttctcattcaggtactctccgaccgagcctccgccttatggtcgggaagtggtatcacggtgccggttctggcacaatggcacagtaataggaaaagcggcaagccctgagcgaaagaggagcaatgactggatctgctgtgcgtgtggacggaacgcaaggtatcacccccatctggccggtggcgacggcagtgaatgccgaaggcgccctgacattccacgggcgcaccgccgagtcgctgcttgacgagttcggatccccgctgtatctgatcgacactgacgaagtttccgcccgcgccagatatttcgtgcgcgcggcggccgacgccttcaccaactccaccacgcacgtgagtttcgccggtaaggcgttcctctccaaagaagtcgtgcggttggtgaccgatgcaggcatgctcgtcgacacatgctcgatgggggagatgcgcatcgcgctcgccgcaggcgtccccggccgtcgtctggtgctgcacggcaacaacaagtccgacgcggaaatcgaactcgccatcgagcagggctttgcgaaaatcgtcgtggacgagccggatgagccgtcccgcatcgccgccatcgcgcgacgactcggcaagcgtgcccgcgtgatgctgcgcgtgaccgccggcattcacgccggtggccacgaatacatctccaccgcgcatgaggatcagaagttcggcgtgccgctgctgccggccggcgccgatgccgcggcactcagcgtactggacgaactcacggctgatccagcaggcgtgacgccggctgttacgaacgcgcacatcgccgaacgcgatggtgatgccggtgacgggaacgcgaagcccgagcgcgaactgcactacgacatgaagtacccgtatgacctgagccacgaggagatccccgaaaaggacaaggcgctcgccgccgcgatggaaaccgtggcggatgggccggcactggccgtgctcaaggacatcctcacacggtccgacgagttggaactcgtcggcattcactctcatatcggttccaacatccatgacgcagacgccttcatccaggccgccaagcgcatgatgctgctgcgcaagaccttctacgccaccgacgcctatacgctgcccgaggtcgacttgggcggcggatactccgtggcatacaccgacggcgaggattcgatggacgtgcgcgtcgagctgcgtcgtctcgccgaagcggtcggtgccatcaaccgtgcgctcggtgtgcccgcgccggccatcagcttcgagccaggacgatggatcgtcgccccggccggcgtgaccctgtatcgtgtgggcacgatcaagccggtgcatctgtccgacgccaaagacaagaccggcaatcccatcgatgagcgcgtgtacgtgtcggtggacggcggcatgagcgacaatattcgtccagcgctgtacggcgccgactacacggtccggctggccaaccgtcgcgggtcggacgagtcgatgctggtgcgcgtagtcggcatgcattgcgagtccggcgacatcatcgtgcacgaggacaggcttccggccgacctcaggcgcggcgacatcctcgccgtgccggtgacgggcgcatacggccgcacgatggcgagcaactacaatcaggcgctgattcctgctgtggtcgccgtgagtgaagccggcgcacatgtgatgatccgtcgccagaccattgacgacctgctggatctggatcagggctgaccgttcagcgccagcggcaagatataaaagcaaaagcagtagaactcaaaaaaaggagtcctccccggctatcagggaggactccttattgtttgttgcggttgtgtctaccgaatcacttggtgacgatggtgccaatcggagcgccggtagccaccgcacccttggcggtgatcgacagcttatcgatcttggccgggttggtgaacacgacgatcacgtcggtgggctttccagcggacttgaccacattccagtccacgtcgaccagcgcgtctccggcgttcacctgctggccttcgctgaccatcatcgtgaacggggatccggcgagctgtacagtatccacgccgatgtgcacgagcacttccactccggcgggagtggtgatgcccactgcatgcttggcctgggcgaccgtggtaatcttgccggccaccggggcgaccacacgacccgacgtgggaaccacggcgaatccgtcgccaaggatcttggcggcgaaggtctcgtcgggcacttccgtgatcggcttgatggcaccgtccacaggggcgagcaccgcgttgtcagcggctttcaccttgggggcgggggcagcggcagcgggggctgccgtcacgcttttggggaaccaccaccgatgacgggcttgccgtacagggcggacagagcgtcagccacggcctgcacctgcgtgccgacgatgatctggacgttcttcttgtcgatcaccttgacaccggggacgccggtcttgcggatggcgtcgacgtcgaccttcgaggaatccacgacacccatgcgcagacgggtgatgcagttctcgatttcggtgatgttgtcgtgaccgcccagagcggcgtacagcttgccggcgaggtcggcgtacttgtcaccggtggacgaggtcgcggtgtcgaacgctgcggaggaggcatcgtcgttatcgtcatcgccacggcccggggtcttcatgttgaacttcttgatcatgaagtcgaacacgaagtagtagatgaccgcgaagacgaggccctgaacgataagcatccacggcatatgagctgcgggaaccttcagcgacaggaaccagtcgatgaagcctgcggagaagttgaagcctgcgatccactggaacgaagcggcgatgaacaccgagatggcggtgagcagcgcgtgcaccacgtacagcgggaaggcggcgaacatgaaggagaactccagcggctcggtgacaccggtgaggaacgcggcgagcgcaccggcgagcatcagggatccggtggccttcttgttctcgggcttggcgttcttgtagatcgcgagtgcaccggccggcaggccgaacatcatgatcgggaagaagccggcctggtagatgccggtgacgtacacgccgaacgggtggaagccgccggtggcgatgaccgcgccactggccgggtcggcgctgccccagaacttgccgatgtcattgatgttggcaaggttgaaccagaacacgttgttcagtgcgtggtgcagaccggtcgggataagcagacggttgaagaaggcgtaaatgccggcaccgacggcgccgaggcccatgatggactcgccgaaccagaccagcgcaccgtagacggccggccagatgaacagcaacagcagcgagatgatggacatgaccgcagcggtcagaatcggcacgcaacggcggccggagaagaacgccaggaagtccggcagttttgtcttgccgaacttgttgtatagcgcacctgccacgcagccgaccaggatgccgaagaacacgttcttgttgccgatggcgccagcggcgaatgccgggtgctcggtgtcgaccttggtggcgtcgaagccaaggaacatggacgcggagcccatgatcgtggtgacggtcaggaaaccgaccagtgcggacagtgccgaggcgccgtccttgtcgcgagccatgccgatggcgacaccaacggcgaacagcaggcccagattgtcgaggatcgcgccgccggtcttgcacaggtaggcagcgacgacgttactgccaccccaaccgctcgggtcgatccaataaccgatgcccaggaagagtgctgcagcaggcagacacgcaacgggcagcataagagcgcgaccaaggcgctggatatatgctttcattccaacctccctctgaggatacggacggcgctttcttccgccaaaattcccgttcacgtaccatcccaccattggatcggacgctcgcgagtatgtcagcaacgccgcttcaatgaacaatggtacgtgacttttacgatatgaggcccgtgtttcgttaagattatttgctaaataggcaggaaacatggcgggtgtataagggctcagccttacgggaagctggtgtttcacgatttctctgtttaaggcgttaatttgtaaatctactttactgcggcgtgtcgttagcgctgctacatagtggaaagccaagggaaacgaggccattgggagctggatccggcctccggggcgttgacgggcggcgtgtcggattcattccgtaggatggtacacagtgacgccggcccggcgaccctctatcggtgagtggcggccgggcgcgccaaacaccgctgaaggaaggaaatccgtggcacagctgaatgacaaccccatccgcgttggactgttgggagcgggaaccgtcggatcacagaccgcacgtctgctggtggagcagaaggacgaactcgctgcccgcatcgggcgtccgatcgagctggtcggcgtggcctgcctggatcccgatgaggtggacttcccctggatcgacaagtctctgctgacgaccgacacgatgaaggtcgccaccaacgccgacatcgtcgtcgagctgatcggcggcaccacagtggcccgcacgttcgtgatggccgcgatcgagtcgggagcctccgtggtcaccgccaacaaggcgctgcttgccaagtacggcccggaaatctacaccgcggccgaggccaagggcgtcgacatctacttcgaagcggccgttggtggcgccatcccgttcctgctgccgttgcgcgaatccctggcgggcgacaaggtgaccagcatgctgggcatcgtcaacggcaccaccaactacattctcgacgagatgaccaccaagggcctgcagttcgatgacgtgctcaaggacgcccaggccaagggatacgccgaagccgatccgaccggcgacatcgaaggctacgatgcggccaacaaggccgcgattatggccacgctcggcttccacaccaacgtgacgatcgatgacgtgagcgtcgagggcatcacgaagatcaccgccgacgacatcgccgcggccgccgccgagcacaaggtcatcaagctgctcgccgtcgtggagaacggcgaggccggtgtgtcggcgcgcgtctacccggcgctgattcccgaatcgcacccgctggcatccgtgcacggctcattcaacgccgtgttcgtcaaggccgaggcggccgacgacctcatgttctacggccgcggtgcgggcggcgctccgaccgcttccgccgtcgtcggcgacgtggtcaccgaagcccgccacatcgctcaaggctgcaccggcccgtccatccccatgtaccacgagctgcccaaggcgccgatcagcgccagccgcgccgcgttcgccgtgcggttcctcatccacgacaagccgggcgtgctcgccgccatcgccaaggagttcgccgaccacggcgtgtcgatcaacggcgtcaatcaggatctcaagccgacgatgaccgatcctggttatgacggcgagatccagcagctgcgcatcgtcacgcatctgaccgacgaggtcacgctgcgtgagactgtcgaagccgtccgcacgctggacttcgtcaccggagagccgtccatcctgcgcgtgctcgactagtcatacggttgcctgcccccgctgtcgggggctgtcggcaaagccgactgggggtggtttcgcggcgtttccgcgaaaccaccccgatctcactatcgtttgctcccctcccccatcagcggggacggaatcgctgaatcaaggaatcatggaaccaatctgtacacaggtcaaggtccgcgtgccggctacaagcgccaatctgggctccggcttcgacacggtcggcctcgccctcgattatcatgacgaactcaccttcacgctcagccgtgacccgtccaatcgcgccgcgcaagtgctgatctatggcgagggcgaggacacgctgccgcgcgacgagacccatctggtcgtctccacgttccgcaaggcatgccagaccttcggcctgggcaaggtcgggttcatcctcgaagcgcacaacaacatcccgcaggcgcgcggcatggggtcgtccgccgaagccatcgtggcgggcatcgccgccgctgccgcgttcgcgcaggagggccggctcaaccgcgattccatcttcgagctggcggccgccatcgaaggccatcccgacaacgtggcgccggcggtgtacggcggcatgaccgtctcatggaacttcgacacggccgaaggggtcggctcggtgccgatccccggtggagacccgctgcacggcggtttccacacggtcaagtacgcggtcgatccgggcgtcacggcggccgtgttcgtgcccgactacgaactgtccaccgagaaggcgcgcgaggcgctgcccggcgaggtcgcctatcgcgacgcggtgtttaacgtgtcgcgcgtggcgctgatggccgcggcgatgaacccgcgcgcgctcgcgtccggcgaagagccgaacgcgctgctgtacgctgccacgcaggatcgcctgcaccagccgtatcgcaaggggctcatgcagccgtcatgggacctgattcaggcgttccgttcccgtggtttcgccgccatggtgtccggcgccggcccgtgcgtgctggtgctgcatcacggcgacgccgtggcggacatcgatgaggtcgcggcggaacagctggcttccggccattggaaggtgctgcacctgcccatcgacacggtcggcgtgcaggtcgagcgtaagtaggaataccgcacgtgcctcctcgcccgctcctcgggccggagatgaggggagcgcgaagttgccggttgggtgatgcggcagctggtgcggcggcaaaagaaaggtgacgatcatgtccattccgatgattctggcgtcgaagtcccagccgcgccgggatgtgctgtatgcggccggcatctgcccgaccatccgcgtgtcccatgtcgatgagccggctgcgctggaaaaggccgccgccgagcgcggcgtcaccgttgaccagctgaacgtcgaacagcgcgtgatgattttggccgaggccaaagcgcaggccgtgcatcaggcgtaccgcgatgtcgccgacgcggccgcgagcgcgacgggcgagcgcgtgatcgcgtacccgttgcaggccgcggagcttcgcggcgagatgaacgtcgcggacatacctcgccagagtggcgctccgcttgactattcgaaggcgccgatcgcgatgacccgtgacttctccggcgtggacatgccgaccgtcaccgaaccgatatccaatgtgattgccatgcagccggggctcactcgggcgagcagcggcccgctgatcgtcggctgtgattcgatgttcctgcttgacggcgaatgctacggcaaaccgcacagcgtcgaggtggcgcgtgagcgactgcgccgcatgagcggcgccaccggcgagctgtggaccgggcactgcgtgatcgacttcgcgtccgggcgcgtcgagcgcggcgcgagtcatgccgtcgtgcggttcggcgagttcagcgaccgcgacatcgaacgatacatcgccaccggcgagccgctggaagtcgcgggatcgtttacgctggaaggttttggcggcgcgttcatcgacggcatcgacggtgacccgcacggcatcatcggcatcagtctgccgctgcttcgccgactcgtcggcaagctcggcgtggactggaccgacctgtggaacgtggcccgcggggaatcggcgcccgaagacaagaccggaggcagcggagtcgtgccgcccaaggagaacgtgcatcagcctggcgacggctggatcgactgcgcatgcgggcgcaagcactggggattgaacggtgcctccggcgtgctgctcgcgcggcgtgaccccaagagcggcgaagtgaccagcgtggtgatgcagcatcgcgccgcgtggagcgcggaaggcggcacatggggcattcccggcggcgcgacggccgacggtgaaagcccgatcgagggtgcgctgcgcgagagctacgaggaggcgaacatcacgcccgaagacatcgaggtggtcgggtcctaccgtgaggatcacgggccatgggcgtacaccacggtcttcgcgttcgagaagcccggtcaccgggtcgtgccgcgggcgaacgatgacgagagcatggaaatcgaatgggtgccgatcgacgaagtgcccgaccgcaagctcttgaccgcgatgcgcacagactggccgcgcttcgccgagcgcctgcgcgcgctggccgctgccgcacggtgttcgtgacggttactgcagttgcgccaaacgctggtagatgtcggatggaaggtggcggtttgcgaatcctttgacgcgaattcccgtgtcgaggggcatatacacgatgcgcatgccggcgcgcgactgttggcctcgtcgatgttggaagtggaaggaacgccacccgctgaaaccgtacttgagagggcttccttctacgttgccctccacgagctgtgtcagggttcggtgaactctggccaccgccatcttgaattcgccttcgtcgggccagacatatgccagaagaatcacatcatccgcaagtgcatccggatccatatacagaccgcggacggacgagatgatggcaatggcttgctccaataatgcgtagtcggcggccatcagcgaccgccataaaggaacgcgtgaatcttctccttgcgccgcttcaggctttcctgcgccgactgtgacagttcggagccggtctcccattgttccttatcgcctcgggcggtgaacatctgctgtatggtgaggtgttcgacctcggattccagcgcattgatgacatccagcatctcgttgagagagtccacggacaccagatagccggctgtgtcggcgcggtcgacgatttccagcaatccccgctgctccagcgcctttcgccatgcgttcgaacgggacaactcggtcaacccgatgcgagagcccggcgtggagatctctcgtaacgcctccgcacgttccttgatgtccatgtaagtcaccaccttaatcacaacaaaatatgcattatattacgcatagtactacatgatataatgcaatatatattcacgactgccgagccgtaccgcagacgagcgactggggggccttagtctcgcttcgcgacagaccttcgggccctgcaatcacggacgccctgtgggcgctcagggtagtgccaccactctcttcccctaatccttccggatgaggggagaaccggttcgccgcaaggctcataccgccgcccgatggccggtcgcgtgccgcctgcgtaatctcggaggcatgaacacagcaacatcgcaatctcagtcctgcgcccggtctcagtcgtggacaccggtgatcgaggcccgtgacctggtcatggactacaccgcaggcatggcccgtgtgcaggcggaccacagtgtcaccggcgtgatgccgcgaggcgccggaaccggcggcccccatccgtatgcggccggcgaaatcggctacgccatgcccgccgtgcatacgctagcgctcaatcacgtgaacttcgacttggcccccggcgagacggtcgccgtgatgggaccgtccggttccggcaagtcgacgctgctgcacgcgctcgccggcatcatccgcccgacgtcgggcacggtgaccttccaaggcgcgaatctgaccgcgatgagcgacgcggaccggaccaaactgcgccgcggtgcgttcggcttcgtgttccaatccggacagctgttgcccgagttgccggcggtggagaacatcgcgttgccgatgatgctggacggcgccgactaccgttccgccaccgatgcggcgatgctgtggctggaacggctgggtttgcggcagctggcctcgcagcggcccggcgagatgagtggcgggcagatgcagcgcatcgccatcgcccgcgcacttgccgtacagccggcggtcgtcttcgccgacgagccgaccggcgcgctcgaccaggccaccggccgcgaggtcatgagcattctcatggaagccgcgcgtgataatggcgctgccgtggtgatcgtcactcatgatcccaacgtcgccggcttctgcggccgcacgatgacgatgcaggacggccgcctcagccagacggccgaagccggccttgcccccgctggcggggttcggcatccgcaggctgactgggggcggcccgagagcgctgaaccaccctcagtctcgctgcacccggcagttcccgcaggaggcgcccaatgagcacgttcgcactatggcggctgttccaccgcccaggccggcgcggcggctccggccacacatcggcgttggccatcgtcgcgttcgcggcggcgacggccatcttcctgaccgtgctgggcggcgtgcacgggttcatctggcgcgcgtccgccgaccatacgctgaaatgcctgattgacaggtcgacctgcgcgccgggcacatgggcggtgtgggccggacggctcaaggaccagcacgactgggcgcaatacgccagcacgtacgtgatgctggcggccttcgcctgcatactgctgatcgtgccgttcgtggcgctcgccggctcggcggcgcgattggcggcatcgcggcgggacgcgcgattggcggcactgcgcctcgcgggcgccaccaccagtcaggtgaccagactgaccgcgttggatgccgccggacaggcgctcatcggcgcgttgatcggcatcgtcggctatttcgcgatcatgccgctgatcatgctgctgaatttccaggatcagaggttcacgttcgagcagttgtgggtaggatccctgtcgctgatcgtcgtgctggtggtggtcacggtcctggcgctgatctccgcattgctgacgctgcgtcgggtcgccatcaccccgctgggcgtcaccgctcggaccgcccagccgctgcccacgaagtggcgcgtaatcgtgttcctggtcgtgctggtggccgcgatcgtgctgttcaagaacccgcagggcctgctgcattacggtgaggtgacgatgtatgcggtgattatcgggttcatcgcgctgtgcttcgctctagtgaacctgatcggctcatgggtggtgaccgcacgggcgaggttgcggtcccgccgccctaaggacgccgccacgatgatcgcgatgcggcgcatcctcgacaatcccaagcgggcatggcgcaatgtgtcgggcatcgcgctggcggtgttcatcgctggcatcacctcgatctgcgggttcatcggcgcatcgtcgaccgcgcctgtcgaaggcgtacccgaaccgggactggctttcatccgcgacatcggcaccggagggttgctgacgctcggattcgcggccgtgctggcggccgtcagctccggagtgatgcaagcgggcagcgtctacgaccaggtttccgaataccgcatgctggtgttggaggggacggacgtgaaaacgttgaaccgtgcgcgtttcatcgaggtgctgaccccgctcaacacggtggtggccgttgccggcggctgctcgatgctgctgatgttcccgctgttcgccgcatccatgaccaagcccgccacgctgctcagcttcttcggcggcatagcgttgtgttacgcgctggtctccgtcggcgcattcgcctcgaaccgtgtcgccgccagcctgaatctcaccgactggcgtgccgacgactgatcgcacgctctcagaactcgcagatagggggccttttaacgaaaaaggccccctatctgcgagttctgagagcgtcaactcagcagagcggcgataaccgcgatgaatatggggctcgtcatcgtgctcatcaggatgccgtcgcgtgcgaacgtaagtccaacgttgtaccgggcggcgtaattgtagacgttctggccggtcggcagcgccgccagcaccacgcaggcgtacagcgtcgcgccgcggaatcccatgacgaaataggagagcaggaaggcgatgatcggcatcacgatgttcttcagtacggccacggtgaagatcgccgggcggtcgcccttctgctgcagcggcttggtgccgtgcagcgacatgccgaacgccatcaggatcatcggaaccgcggagtccccgatcatgtcaatcgggtcgaagatgaagttcggtacggggaaccagccgatcttcgcgtcgatcgccgaaaccaggatgccgcccagggagccgatcagcagcggctgatgcagcggctgcttcaggatttccttgaccgataccttgcccttggtggtcacgtcgagcaccgtcaggccgaccggcgtgaagatcgcctgctgcatgaccaggatcggtgccaccagggctccgttgccgaggatgtacgtggctatgggcaggccgatgttgttcgagttcagatacagtgagttcagcgcgccgacggtcgcgtctgccggccccaagtggaagaacagcttgttcagcaccaggaacagcgcgccgacgagtacagcggagaagaacgccacgatgatcgacgaatggaagatctcgaagatcggctctttcgacagaattgcgaacatcagacacgggctggacacgaagaagctgaaacggttgagcaccatctgggcgctcggcccgcctatgcgcattcgagcggccacatatccgactccgattacgatgccgatgacgcagaagccttccatcgcatttaatagacccggcatattcccatcccttttccgtttgctggcaaaccccatactgccatacgcatgtgtttcgcgaggttctgtctcataacgcaggcgaaacccgtctcgcgagccacggtagcacggcatgctgcgcgtcgcgcgcttgttctcgccgccgacggggagttcggccgtctcattccgtcccggcaacgggctccaacgggacgtgctgccgttaggatggtcagcatgactacgacaacgacgatggcagcggccggtgctgacccgcgctcggcgatcgcgccgatcacctgcgacacgaccggcacgcgcgagaaggcgctcgcctcactgctcgaacagatcatggactcgtattccgtcagcgatgacgagaagccgctggccgacgccgtggaggcgttcctgcggtcgaagccgcacctgacggtgcacaggcacggcgacacggtggtcgcgtccacgtcgctcggcaggcctcggcgcgtggtgctcgccgggcaccttgacacggttccggtgatcgacaacttcccgccgcgctggctggcgcccggcgacccgctgatccgggaggacgtcgccgcggcgcaccccggcgagcgggtgatgtggggccgcggcgcgaccgacatgaaggcatccgacgcggtgttcctgtacctcgccgccacgctggtcgacccgcaatatgacctgacgtacgtgttctacgaccatgaggaggttgcggccgagaagaacggtctgcggaaggtggccgaggcgcatcctgattggctcgccggcgatttcgcgatcatcggcgagccgactgactgcggcatcgagggcggctgcaacggcaccatgcggttcgacgtggtcacgcacggggtcgcggcgcattcggccagggcatggatgggggagaacgccattcacaaggccgccgatgtcctgaaccgcctgaactcctacgagccgcgaaccatcacggtggatgggctggattatcgcgaggggctgaacgcgacgctgatttccggcggcaaggggacgaatgtcatccccgacgaatgccgtgtccatgtgaactaccggttcgcgcccgacaagacgctgccgcaggcgaaggcactgatgatgggcgcggatgccggcgcggagctcggcaatggcgagcatgtcgccaccggtggcgtgttcgagggcttcggcatcgagatgaaggacgagtcgccgtccgcccggccgggcatggacgcgccgatggcggtgtcgttggcgaagctggtgcgtgagcgtacgggacgggaaccgctggcgaagctcgggtggaccgatgtcgcgcggttctcgctgctgggtgtgcccgcggtgaacctgggcgcggggagcccgctgcttgcgcacaagcatgacgagcagatcgccgaaagcgagttggcgaccatggccggcatcctggaggactggctcaccggccgcgcgtgagcggggttcgggcgcggatgtcggcatccgtgccatcgaatagtgtgcggacggctgcccgcacaacgctgtcagttggcgctgcaggttttgtcgacgatgtcgtcgccgtccgcatcgatgacgatgatacggatcctgacaccgttcgcggagcgaaagcgtctgcgtacaagcatgggctgggcgttgtcgccacgccaaaagaacgttgaatatggtgagatggtcatggccggtcaaattgtgtgccatacttaaagatggtggttctgcaaaccacctgagcgtgaaaggcgtcgatcccctcgcatgcatgaagatgcgcgagcgctggtgtccgccgaagcacgcacacggacttttaacggatttgcttcctgcgggcgcaagcgtagcgcggccacggtgagagcgtggtgtgagaccgcatgaggccatgagtgtgcgacgtggtgcagcacgtcgtgaggagtatcgtgcctagtgtgaacgataacggtttcagtcgtgacgaaaccgaagaacagcagcctacccacgccgatgcggcccagtcgcctgattcggccgataaaacgcctgcggcgccgcgtcgtcgccgcggtggccgccgcgtggttcgtggcgccggtgccgccggtgccgcggtcgcgctgaaggtcgaggaccattccgctccgctgttcgcggaacccgtggtggagcagccccttacccgtcgtcgccgctcgaaggcggccgacgaatcgccggagaccgccgcatcggccgattccgaaaagaaggatgatgcgcggcacgccaaggccgacggcaagtctcggtccgcgtcgcgctcctcgaaagcgacgaagcgccatgacgatgacgccgatcaggccgaaccccggcgcacccgcgtgcgtcgtcgcaccgccatgttctcctcgcgcgaggacgcttcgccggccgttccgggcgagccgtcggatgacgacctcggcgtcgataccggcaccgatatcatcgtccgcgatgattccgccgatctgtcccgcgccctggatgtcgttagcacgctgccgcaacctgcgccgcgcgctcacgcgatgacgtccgtgctgttccaggagccggtgctgcccgtgccggaaatcgtgcgcgacgcgcgcgatgacgaccgcgaggatgacgaccgcgacagccgcggcggtggcaagtcccgtcgctcgcgcaatggtcgtgtgtcacgtgacggcgcgcagggggacaaggacaagagcgcttcctcccgtcgcgatatcgacggtctgagccacatcgagcgcgtcgacagcttcgataccgacgacagccgcagccgtgacgaatccggcgaggccgacgagccggtgcgttcgtcgcgccgcaaccgtcgcctgaacgcgcaggagcgccgtgcggccgccgaagtggagcagatcgaggaggacctggagctcgacggcatctcctatacgccggtcgacgacgaggagccctccgaggattcgggcacgagatcccgtcgccgtcgccgctcccgtcagaaccgtgccgacgacagccgcggcaacggcgagtcggacagcagccagtccgcggcgcagcaggacgagccggccaagccgtcgtcccgccgcacacgcgacgaggaagaagacgatgactccaacgtcacccgtcgtcgtcgccgtcgccgctcgcgcgcgtccgacgagcagggtgacgatgagatgaccgtgcgccgctcgcgcaagcagcagtacatcgacgagatcaccgacgtcgagggctccacccgactggaggcgaagaagcagcgccgccgcgacaaccgccgcgagcgcagccgccagagccagctggtcgagcaggacttcctcgcgcgccgcgagcacgtgaaccgtctcatggtggtgcgcgaacgcggccatcacacgcagatctccgtcatcgaggacaacgtgctcgtcgagcattacgtctccgacatccaggaggtcgccacggtcggcaacatctacctcggccgcgtgcagaacgtgctgccgagcatggaggcggcgttcgtcgacatcggccagtcccgcaacggcgtgctgtatgccggtgaggtgaactgggacgcgacccgcctcgaagggcagccgcgccgcatcgagctggcgttcaaatctggcgacccggtgctcgtgcaggtcaccaaggatccgatcggccacaagggcgctcgcctgacttcgcaggtcacgctcgccgggcgtttcctggtgctcgtgccgtccggcggcatgaccggcgtgagccgcaagctgagcgagcgcgagcgttcgcgcctcaagggcattgtctcgaagatcgcgccgaaggacatgggcgtgattatccgcaccgcggccgaaggtgccaaggaggaggcgatcgtcaaggatctggagagcctggtccgccagtgggagcgcatcaacgccaagcgcgaggagttctggcacggcaagcggccgaagctgctgcagggcgagccggacgtcgcgatccgcgtggtgcgcgacatcttcaacgacaatttcggcgagctgatcgtcgagggcgacaaggtgtacgagcgcatcgaggaatacctcgacacgatggcgcccgatctcaaggagaagttgtccaagtgggatccgtccgagcatcagggcaaggatgtgttcgacaagtggcagatcgacgcgcagctcaggaagggcatggagcgtcaggtgtacctgccttccggcgggtcgatcgtcatcgatcgcaccgaggccatgaccacgatcgacgtgaacaccggccggttcatcggccgcggcaagagccttgaggagacggtgacgcgatgcaacctggaggcggccgaggagatcgcgcgccagctgcgtctgcgcgatatcggcggcatggtcatgatcgatttcgtcgacatggtgatgcccgccaaccgcgatctggtgctgcggcgtctggtcgaatgcctggcgcgtgaccgcaccaagcatcaggtggcggaggtcacgtcgctgggtctggtgcagatgacgcgcaagcgcatcggccagggcctggtcgaagcgttctccgaggagtgcccgacctgccatggccgcgggttcatcctgcatgacgagccgaccgtcagcgcggattacgacgatccgtatgcgctcaagggcggcgatccgttcatcaagaccaacaagcacggccgcggtacggatgtgcaggtgccgcagggctcctcgccggatatcaaggccaagctcgcgcagatcgccgccgcggcggtcgccgcgaacggcaccgacgaggatgagtgacccgacgcgctgaatgaatcatgatttccggtgtgtcaacctgacacgccggaaatatgatttgcgttagtacatgggtcagtgtagattagattgctggtgtctgaccagcggcttgcgtgcgtcaggcaagtagcttttataacaccatagcaaggaacgaagcatgtacgcgattgtgaaggccggtggccatcaggaaaaggtcgaggtcggtgacgtgattctcgtcaaccgtcttgaggcgaagaaaggcgagaccgttgaattcccggtcgcgctggttgtggatggtgccaaggtgacgctgggcgccaaggatctcgccgcggtgtccgccaagggtgaagtcattgacgacgaggccaagggccccaagatcaacatcatgaagtacaagaacaagaccggcgtgactcgtcgcaagggtcaccgtcagaagctgaccgccgtgaagatcacggcgatcgcctgagccaatacaggaaggatctgaatcatggcacataagaagggtgcttccagctcgcgcaacggtcgcgattcgaagcctcagtacctcggcatcaagaagttcggcggcgaagccgtcgtcgccggcaacatcatcattcgtcagcgtggcaccaacttccaccctggccagaacgtcggcatgggcaaggatcacaccctgttcgcgctgaccgacggcagcgtgaagttcggcgtccgtcacgaccgcaaggtcgtcgatgtcatcgccgcctgagcgataccgcattaagtgtcaagccgcatcccacccgggtgcggctttttcgtttgccgccctagcattcccggcatgcccgcaccgcacgacgcatccccacagagccgtcacgcctgtgccatgcgatgtcacgcctccctcatcagacaccacatcactctccgaggaccccccccaacctcctctggtacaccggtacattacgggttgaaatagccgattccggcaattccccgtgtgaaatcgccgttttcaggccccaaaacgaccatttggcacggggaattccggataacggctatttcaacccgtgttttggcgcatggcggcgcttatcagggcttggaatggtgtcgctgcgatcacgcggcctttccgggcttagacgggtagcggaggaacatgcctgctggcccacatgtgtgggttacgagtgcggcgcgcgccccgacatcacgcgtgtcatggttgtatgcccatatctctgagctgccggacgattcgtcccggattgtcaagatccctgtagtacatgcgcaccatgccgatcgcatactgcgacatgcattgctggcgtttccgttcctcatccactacttcgcgaatttcccggcctgaagtcatatgcggatccacatacttgcgaacgccatcgaattccccgacgattaccgagccgtcttcacgcttccagagaaaatcactgcgatgcttacgaccgggatgatcgagacaggggaattccacctgaatgtcgtcaggagggcagccggcatcatgcaacatgccacgggcctcggattcgccgccgttctcggcacgccgatctgcaagcgcgaacgcgcgctcgacggcggcgcggttgcgtgagtatttcacgctggagggatacgcccggagcacggattcgctcacgaggccgttgcggagcgcacaatccgccggcccgagggcgtagcgcagaggctggcatgccgcgaggtcgaacagtgtttgcagcaagctgatgaccttcactccctgaaccacggtgatgtccggatgcgtgatcgcgtgatgcgatatgtgcctggtgtcctgatgatgcgcgccggggctcgcgacgatgcagattgggaatgccagccgataggagcagtcgagcccgtgcatgatggcggccgtagggccgcagaacacccaatcaggatgttggatggcgagcgctcgtacgatatggcgaacctgttcatgcggatcaagcgattcccaatacgcgggctctgcgtacaggccgcggaagactctcagcacggcgccggtcttcactctcctgcgtattgcctgtatgtccgtgttggtggagggaatggcgcagcgtcgctcctgccgtgcaacggcgaaaagtctgtccagcgaatgatgcgtccccatatgccaagtgtagggggtctgggctcgcgacatctgcgaattcgcgatgagcctattccgccgggaaatccggatgatggcggagcatacggtggagtgcaaggcatccattcgattgcgcataggcggcgacggaccacattcgcgcgtcatgtgccgtgccctctcatcatgtatcgtgtttcgcgcgtcatgtgttgtgcccccgtgcgtcccctcaggtatcacgtctcccttctcaggaccgcatctccctcccccggtaccgcgcctccctcatcaggtaccacatcactctccgaggagccaccccaccctcctctggtacaccggtacattacggggtgaaatagccgttatccggaattccccgtgccaaatggtcgttttggggcctgaaaacggcgatttcacacggggaattgccggaatcggctatttcaacccgtaatttgagcacttgtgaagacctccgcacggattggggggggcagagcgaccggggctgctccgctgcgggcggagtgagagaacctggggagaaccgggggtcaaggtaaggtagagcgttatgagtgattttgtggatagagtgaccgttcatgtcaagggcggcgacggcggcaatggatccgccggcatcaggcgcgagaagtacaagccgttggcaggcccgaacggcggcaacggcggcaacggtggttccgtggtgttcgtggccgacacgaacgccaccagcctgctggactaccggttcatgccgcatcgcaacgccggcgacggcacgatgggtctgggcgacgtcaaggacggctccaagggcgccgacctgatcctgccggtgccgctcggcactgtgatcttcgccgcggtcggcgctcaaggccgtcccaagcgtccgggcgagcagctggctgatctgcgccataacggcgacaagttcgtcgcggctgcgggcggcgcgggcggtctgggcaacgcggcgctggccaacaagacccgccgcgctccgggtttcgctctgctgggcgaaccgggcgaggaacgtgacgtgatcctggagctcaaatccatcgccgatgtagcgctggtgggcttcccgtcggccggcaagtcgagcctgatcgccgcgatgagcgccgccaagccgaagatcgccgactacccgttcaccacgctggtgcctaacctgggtgtcgtcgtcgcaggcgaccaccgctataccatcgccgacgtgcccggcctgattcccggcgcatcgcagggcaagggtctgggactggagttcctgcgccacatcgagcgcacggaaatcatcgcccacgtcatcgactgcgcgacgctggagcctggccgcgacccggtttccgactaccatgcgctggagcatgagctcgccgaatacgccgacaagctggaactgccgctgggcgccatcccgattccggaacgcccgcgcatcatcgtgctcaacaaggtggatgtgccggaggccaaggagctcgccgatttcgtgcgcccggacttcgaacgtatgggattgaaggtgttcgagatctccacggcttctcatgaggggctgaaggagctgaactttgcgctggcggccatggtcgccgacatgcggcaggaggtcgccagccgcgagcaggccgaggaggaggcgcgcgtcgtcatcaatccgttggagaaccggtcgaatcgtcgccgtgcggctgcgaacggcactgccgatttcgccgtggcccgcaaggagggcgatggcggtttctggtacgaggtgaccggcgtgaagcccgaacgttgggtggtgcagaccaatttcgacaatgacgaggccgtcggctatctggccgaccgactcgccaagcttggcgtcgaggacgagctgcgccggctgggagcgaagccgggtgacgaggtgcgtatcggcaaggggcagcgtgccgtgtcgtttgattgggatccgaccatcgccgccggcgcggagatgcttgacggcgctcagctgggtgcccgcggccgcgatctgcgtcttgaggatcaggagccgggcggccgtcgccgtaccaatgcggagcgtcgtcgtcagtaccacgagatgatggacgccaaggccgcggtgcgcgaggccatgatggccgaacgtcaggccggtcactgggctgatccgagcgtcgacgacgaccgtcacgacgagcagagcctgttcggtcgcggcgaggacggcgacgagaatgacggcggtctggcctgacacctgaccacccccagtcagcttcgctgccagcccccgccagcggggggcgagatagtgcgtcagctctgctgtctgttttgacggctcggcccgccagcgggggcgttagttgcccccgcccgcgggggctggcgcggagcgactggggatggctggcacattcgtctgcggttccaccagcgcggcggccgcagcgtggaacggcggcgtcctatgacaccggcgtctgtgatgattcaagatatacgtgatcgggaagggagtgcgtgttgtccgtcactgaatcggatgtgcgccgcgccatcgcaggcgcacggaccatggtcgtcaaagtcggttcgagctcgttgacgcagccgtccgggcatctggatgtcaagaagctgaactccctggtggccgcgctgtccgccgcctcggcgcagggcgcccgcgtggtgctggtgtcgtcgggcgccatcgccgcgggtttcggcccgctcggcttcgagagccgtccgagtgacgtggcgacgcagcaggccgtcgccgcggtcggccaggggctgctgatggcgcagtatgaggccgcgttcggtcgtttcggcgttcgggtcggccagattctgatcactgccgaagacacgatccgcgcggtccagtaccgcaacgtgcagcgcacgctgaaccgtctgctggaactcggcgtggtgccgatcgtcaacgagaacgattcgctggcgagcaacgagatccgtttcggcgacaacgaccggctttcggcactggtggcaaacctcgtccgggctgatgcgctggtgttgctcacggatgtggacggcctgtatacagctccgccgagcacgccgggcgcccgccgcatcggctttgtgccgaatgtgatcgacacgatcggcgacgtgcaggtcgccggttcgtcgtccggggtcggcacgggtggcatggtcaccaaactggatgccgcccgcgtagcggccgtgtcgggcattcccgccgtgctgacgagcgcgacgaacaccggcccggcgctgatgggcgatccggttggcacggtgttcgcgccggtgaagcaccgcggttcatcgcgtcggctgtggatcggcttcgcgtccgacccgcgtggagccttggtggcggatgccggtgcggccaaggcggttcgaggcgggcgcgcgagtctgctcgccgccggcgtcgtggaggttcacggcgaattctccgccggagacccggtgtggattgatgacgaggcgggcgcgcatctggctcgcgggctcgcgggcttcgactccgaggagatcccgcagatgctcggccgcaacaccgcgcagctcaggcggttcctgggcgacgagttcgctcaccccgtggtgcaccgcgacaatctcgtgctggtctgattcgtcgcgcaacgagatccgccgtgccgggcgtagtcggggtctgttgttttttcgtgctctgggtttagcatggatggcatgactatggctgactggcagactttttccgaccgtatcaacaatgtggcaccgagcgcgactcttgccgtcgattctaaggcgaaggcgatgaaggccgccggcgtcgacgtgattggcttcggcgcgggcgaacccgatttcccgactcccgcggatgtcgtggatgccgccgtcaaggcgtgcaacgacccgcgcaactacaagtacacgcccaccgccggcttgcccgagctgcgcgaggcgattgcggccaaggtgctgcgtgactccggctacgaggtgaccgccgatcaggtcgtggtgaccaacggcggcaagcaggccgtgtacgaatccttccaggtgctgctcaatgacggcgacgaggtcatcattcccacgccgttctggacgagctatccggaggccgtcaagctggccggcggcaaaccggtcgaggtgttcgccggcgccgaccgtggtttcgagcctgacatcgccgccatcgaggccgctcggaccgagcgcacgaaggccatcatcatcacctccccgaacaacccgaccggtgctgtgtggagtcgcgagacgatccgcgcgatcggcgagtgggccgtggagcaccacgtgtgggtcatctccgacgagatctacgagcacctcaactatgacgacgccaagaccgcatacgtcggcgtcgaggtccccgaatgccgcgaccagctgctggtgctcaacggtgtcgccaagacctacgcgatgcccggctggcgagttggctggatggtagcccccgcgcccgtcgccaaggccgtcgccaagctgcagggccatttgagctccaacgtttccaacgttccgcagcgagcggcgctcgccgccgtcgcaggttcgctcgacgaggtgcatatgatgcgcgagtcattcgacgcccgccgcaaggccattgtcgccgccctgaacgatatccccggcgtccactgcccgacgcccaccggtgcgttctatgcgttccccgatgtgaccggcctgctgggcaagccgctcggcgagaacggcaccgtcgtgaacacgtcttccgaactcgccgcggcgctgctggacgaggcccatgtcgccgcggttccgggcgaggcgttcggcgcccccggatacctgcgtttctcgtatgcgctggccgatgaccagctcgccgagggcatgcgtcggttccgccgctgggtcggctgaaaccgttgcaagaggtcgtgcgcggtacctgccgcgcacgccgcggcacgccgattacgcgccggtcgagacacgcgattggacgaaatcggcaatccccgctaatatggcctcttggcggttttgccaagtaacggacacgtagtcttgcgtgccgggtacagtgggcaaagttcacctagggaagtggcgcaattggtagcgcaacggtctccaaaaccgtaggttgtgggttcgagtcccgccttccctgccaagtatttgcaaccaacacacaaaaggatgaacatggcgaaggcaagcaaggcggagaaagcggtcaagccgaatgtattcatgcgcatcggcctgttcatcaagcagattatcgatgagcttcgcaaggtggtcacccccactgcgaaggaactgttcttctggtctcttggcgtgttcatctttgtcgtgttgctgatgctcctcgtcacgggcatggatttcggtctgggcaagctcgtgctgtgggtgttcggctgatccatcgaccctgaaggtgaaagttacgcatgactgatgaagtgaatctcgataacctcgacgcactggcggatcttcccgattcggccgattcggccgttgaagccgatccggttgcggacgcggcggttgattccatcaatgacaatgccgaagaacagcccgtcgcggctgaggacgccgttgaatccggcaccgccgaaaacgatgcggaagcgtccggcgacgccgacgagcaggaatccgaagaactcgacgcgggcgcaaaggccgttgaggagttctcaaagtcgctgcgcaccctggaaggcaagtggtatgtgctccacacctattccggttacgagaagcgcgtgaagacgaacgtcgaatcccgtgtcgtcagctttggcctggaagacaagatcttccagatcgaagtgccgatggaggaagtcgacaagcacaccgacaagggtaagaaggtcatcacccgcgtccgcgttcccggctacgtactcatccgcatgtggcccgacgaggatgcccgtcgtatcgtgcgcgagaccgaaggcgtgaccggcttcgtcggcccgaccaaggatccggcgccgctgtcccgcaaggaagtcgtcgccatgctggcgccgatgatcgcctccgaagcgctcaagaaggccggcgataagcctgccgcggccaagaagcgcgttgtcgaggtgtcttacgccgtcggcgatcaggtcaccgtcatcgacgggccgttcgccacgatggccgccgtcgtctccgatgtcgaacccaccacgcagaagctcaccgtgctggtttccatcttcgggcgcgacacgccggtggaactcggcttccatcaggtggagaagcttcagtaagtcgtcagacgttgtttgcatgaacggcggtcggttttccggccgccgttttgcgttgccggcaccatttgtgccacgacatgccacgcacgtacaatggctctcatggcatccaaaggaaaaccgtcaccgcgttccgcggtcaagccgctgtccaatgcacaagtgagcaggctcgccaaggcgcacacgctcgtcgatccgatgcacgacctgccgaccggccctgatcgcacgatcaacgaggccgaaatcgccgcgcagaaccccaagggcacctcacggctgctcaagggcgtcgatgtcgtgttccgcgcaagctgcaggacgtacgcctgggggctcgacaacatccctgaaaccggcccgttcatcaccgcggccacgcatgtgaccatgttcgacgtgttcgtgccgatggcgtcgctgttccacatgggccgtcgcccgcgctacatggcgaaggccgagatggcgcactggcctctgatcggcaagtggttccagattgtaggcatgcagccggttcagcgccggtccggcaaggcacgggccatcgaggagacctcggtcgagattctgacgagcggccgcccgctgaccgtctggccggagggcacggtgacccgcgacccgaagaaatggccgatgagcatgaagaacggcgtcggcgtgatcgcactggaggcatcgcgccggctcggataccaggtgccgctgttctgcgcggtgacgtggggtgcggcgagcatcaaccactggtggccgtggccgcgcaagaacgtcgtcatgtgctacgacgcgcagctggattacgctgatctgctggtcgacagcgagtcgtggggcgatgagccgcccgtggagctcgccgacgagctgacccgccgggtacgtgtgcgcatgacgcaggtcatggcggagatccgcggcgagcgtgctccctccggctactgggattaccgtacgatgagccgcgttaccgactgattcccgaacacgacggacatccgagacgcccgcgcagcgccatgccgcgcgggcgcgttcatacctgcgcgacgtgcgcatggaggtctcgtatccggggctggagtagggtagtgggttatgaaatgtactgtattgggtgccggcgcatggggcaccacttttggccaagtgatggcggacgcgggcaatgacgtgacgatgtgggccatcgagcccgaaatcgtggagggcatccgcgaccggcaccacaatgccgttcgtctgccgtccgtcgccaagctgcccgacaacatgaccgccacgggcgaccgggcgcaggccgtcaaggacgccgatatcatcgtcgtcgccatcgccgcccagttcgcgcgcgtggcgctcgccgagttcaaggacctgattcccgataccgccgtcgtcgtcagcctgatgaagggcatcgagcggaacaccaagaagcgcatggatgaagtggtccgcgaggccctcgacctgccggctgagcgtttcgccgcggtttccggaccgaacttgagcaaggagatcgccgaccgtcagccggccgccacggtcgtcgcctgcgagaatctggacaatgcgcgcaaggtggcgtccgcctgcacgaccagttacttcaaggcgttcatcacttccgacgtgatcggactggagatgtgcgggtcgttgaagaacgtcgtcgcgctcgcagtcggcatggcccgtggagccggatacggcgagaacaccgccgcgatgatcgagacgcgtggactggcggagctgaccgcgcttggcaaggccgcaggtgccgatccgaagacgttcgccggtctcgccggcgtgggcgatctgaccgccacctgcggctcgcccctgagccgcaattacacgttcggcgcgaatctgggcaagggcctgagcgtcgaggaggccacgaaggtgagcaacggcgtcgccgagggcgtgccgaccaccgacgccgtggtcgcgctcggcgacgagctcggcgtgccgactccgctcgcctacgcgatgagccgcgtgctgaacgaaggcatatcctgccagcagatgctctccgaactactcggcaccgagatcaccgaggagtaggctgcattaaccacccccagtctcgctgcgctcgacagcccccgtcagcgggggcgttagcatatgccccgcagcgagacggggtggttcgcgccatcggcaaagctaatctcaccggtgcccaccctgctgagtttggcgggttttgcaagaggcgaattgttacgggacggtgcgccatcgcacgtattaggctatgacccagtatgtgcaaaacatggcatgggaggaaaacatggctgaaacggccaagattcgcgttgtggtgatgtatggcggcaaggccgacgagcattcgatttcctgcatttcgactgccggcgtgctgcgcgcgcttgacaccgaccggttcgagccggtgccggtgggcatcaccaagcagggccagtggatcgtggacggcgaggacccgcgcggatgggatatggccgacggtctgccggtcgtcgagaagactcccggctcgcgcgacgtcgtgctggacgtggtgctcgggcaggatggcttcttcgcccgcaatgacgacggcacgctgagctcgctggggcacgttgacgcggtgctgccggttctgcacggcccgtatggcgaggacggcacgattcagggtctgctggagatgatggatgtgccgtacgtcggttgcggcgtgctcgcgtccgccgcgtgcatggacaagcattacacgaaggtgctgctggccgccgccggcattccggtcgctcccggcatcaccgtggacgcgcgcggcttcgacgcggcgtcgcggttcgccgctgatgccgatggtctgctcgctcgggtcgaggaggccggactggcgtacccgctgttcgtcaagccgtcccgcgccggatcgagcttcggtgtgaccaaggtggagcatgccggtgacgccgccgagctggccgccgccgtgttcgaggcgagccatcatgattggcgaatcctgatcgaacagggcatcgacgcgcgtgagatcgagtgcgcggtgctgtgcccgaaggccggcagtgagccgcaggccagctggccgggcgagatcgtgctcgacaagcgcaacagcggcggcgaccagttctacgacttcgacagcaagtacatggattcgtcggcgagccatgtggaggtgccggcgaatctgcctcaggagactctgcagcaggtgcgtgagaccgcggtcaaggcgttcaaggcggtggatggcgccggcctgagccgcgtggacacattcgtgacaccggacggcgaggtgatggtcaatgagatcaacacgatgcccggtttcacgccgatctccatgtatccgaaggcatgggaggcgaccggcatcggctataccgagctgatcaccaagctgatcgacggcgtgctgcgctagaaaccgacggcacggttaggagaaacactatgggaaaacatgttggcggcaagctggtgcttgccggagccgtagccgcgggcgccgcggtctgggccatcaagccgcgttcgttcagcgacaagcagcgtcatttcgtgccgtcggttccggacgtatggtatgcgcatcgtggcctgcatgacgcgggatcgggactgacgccggagtatgcggcgcacagcggcgagtatgtggcgctggcgcgtcgctgcgcattgcgcgcaggatacgggaccgctgacttcagcggctcgatcgccccggagaattcgctggctgcgttcgccgccgcctgtgaggctggattcggcatcgaattggacgtgcaactcaccaaggacggccgcgtggtggtcgtgcatgacgataacctgttgcgcgtggccggagatccgcgcaagatcgccgacctgacgtatgaggagctgtcgcgcatcccgctgttccccgcgcccgcgaagccgggggatgccgaggcggcgcccgtcgccgacccggtggccgccgcacagttcgctccgcagggctactaccagcacgtgccgctgttcgtcgacgtgctgcgcgtgatcgcgggacgtgtaccggtgatcgtggagtacaagttcaccgacaacgccgcgtggggcgagcgggcggacgagctgatggagaagggcgaccaactgctgcaggcgtatgacggcccgtatgtgatcgagtcgttccatccgggcgcggtcaactggtacaaggagcaccgtccggaggtgtgccgcggccagttggcagagccggcgtcgctcaccggtaccggggtcaaggagtggttggccgggatgttggcgttcgattggatctcccgcccggacttcgtggcgttcgactggcatggcggcccctctccgcagctgcgggccgcacgatggatgggcgcggtaccggtgtcgtggacggttcgcagcgcggacgaactcgccgaatgcgaccagtatttcgaccgccacatcttcgagtcgttcgttccggatagcaaatagtccttttgtatagtgcgtgcccccgtcgcgaagcgactgggggcattagcgtccgtaagtgcgcgccgaaacgacaagtgcgcgcacttacggacgcaaacagacccatttgcgtccgtaagtgcgcagagtcgtcgttccggcgcgaacatatgaacgcaaatcaccttcggtgagcatcgcatcggccagttggctcttccggcgctccaataagtaaggtaagttaacaaatagcggaagacttccgcgagacagtgttgtcgcgacggggaaagatcactgttctttgaggggatttgcgcaggttttttcatgcatacccattggtatatggcgaaaatttctattttccttggaaactaataaagttaacaacacacgttcttgtattttgttaagagtgttatcatagaaaactgagacgcgcgtgtcgggcttccgtcatgcgtatccgctcaaggttaagccttagtgctccatgatgaaggtaaggaaatatgagaaaacgagtggtttcagtggcccttgcggttgcgctcgctgtcgccccactgggggtggtcagcacagcgtccgccgcgccgctttctgcaagtgatttgcagactctcgcgctccgttcagcggctagctccaatgacgcgaacgccaacgatgtcgccaccgtcgcggacgatgctgccgtgaacggctggacgattgaccgcaacaccgccaaaggcggcgaaattcttgcagccggcactggcgattatgcaggatggactcatttcaagtccacctccgccaacggcaatgccaccagcagcagtggctatccggctgtcgccattagcggcaagacgattgacctgactcgggctggagagttctccatcaaggtcaagtccccgcaggctggttccgcgaaccgtttcggcttctacctcggctacaaggatccgggcaacgccctgttcctgggctatgacaaggggggctggttctggcagaagtatgtcggcggcaatggcgattggtacagcggcacacgtgtcgctgcccctgccgcgaacgctgaaatcaccgtcaacgtctcctggactgccgccaaggttgccacgctgactattgacggacagaaggcgttcgatgtggattactcctcgatgaccgcgctgaccgacaagctcgccatgaaggccggctcttactccggcaccagcgaagtcactgatgtctacttcaaaaacttcaccgtgggtgaagtcgccaagcacaacgtgaccggcaaggtcgtcgacgccagcggcgccgccatcgccggcgccgaagtcgtcaccggcaagaactccgccaccaccgcggcggacggcaccttcaccctcaccggcctcgccgccggcgactacacgctgaccgtgtccgccgaaggctacgatgacgccaccaagaccgtcaccgtcgccgatggcaatgcctcagtcggcaacatcacgctgaacaagtcggccgaagtcgccactgagacgctctccaccgccgccatggacgtgcgcgtgaagaagaacttcccgtccgtgtacgactacacgatgaagaagctcgacggcaagatcatgtacggccagccgaaggacgtgcgcgtcatcaccatcaacggcaccgacgtgacgctgaaggactccgacgtgaccttcaagaaggtcagcgcgaccgaggcccagtacacgctgaacgtcaagagcggcaacaagatcaacgcggtcgtcaccgcgcagatcaaggtcgtcgacaatacgctcaagctcaacgtcaccaagatcgtgaacaaggcggatgacaccaagaccgaggccgaggagaacccggtccagacgattgcgttcccgaaccagagcctcatctccgtgcgctccggtcaggacggtgcccagttcaccggcgcccgcatgtcgtccgacactgccaggcccggtgacaccaacttcgacatcaccgccgacaccacggtcagcaatgcgaacgactacacctacggcttcgtctcgggcaatggcctgagcgccggcctgtggtccaactccgagcacgacggcaccaccgtcggcaacaccgtcgccggcggtgcgaggaacacccgcgtgctcacctccacccagaaggtcggcaaggccacctccttcggtctgggcactgcaccgtggtactaccaccgcgtcgtgaccgacacgaagaagaacacctacaccgtcgaagagaccgacatgccgaagatggccgtcgccatcgccggcgacgagaacgaggacggcacggtcaactgggaagatggcgcgatcgcataccgcgacatcatgaacaacccatacaagtccgaggaagtgcccgagctggtcgcatggcgcatcgccatgaacttcggctcccaggcgcagaacccgttcctgaccacgcttgacaacgtcaagaaggtcgccctcaacaccgacggcctcggccagtccgtgctgctcaagggctacggcaacgaaggccacgactccggccatccggactacggcgacatcaacacccgcgccggcggcgccgcggacatgaacaccctgatggagaagggcaccaagtacggcgcccgcttcggcgtgcacgtcaacgcgtccgaaatgtacccggaagccaaggccttcagcgaggacatggtgcgtcgcaactccagtggcggcctgagctacggctggaactggctggatcagggcatcggcatcgacggcatctacgatctcgcctccggcatgcgcaagtcccgcttcgctgacctcaagagcaaggtcggcgacaacatggacttcatctacctcgacgtgtggggcaacaacacctccggcgccgaggactcgtgggaaacccgcaagatgagccaaatgatcaaccagaacggctggcgtatgaccaccgaatggggcgccggcaacgagtatgacgcaaccttccagcactgggccgccgaccttacctacggtggttccgccatgaagggcgagaattctcaggtcatgcgcttcctgcgcaaccaccagaaggacagctgggtcggcgactacccgtcgtacggccaggccgcgaacgccccgctgctcggcggctacagcatgaaggacttcgaaggctggcagggacgcaacgactacgccgcgtacatcaggaacctgtacacgcacgacgtgtccaccaagttcatccagcacttcaaggtcgtccgctgggtcaacagcccgctcgacgccacctccgtgaaggatgcctccgtcaacaacggcaacgagcagatcacgctgaaggacgaccacggcaacgtcgtcgtcctgtcccgtggctccaacgacaccaacaacaccgcgtaccgcaaccgcaccatcacgctcaacggcatcaccgtggcgtccggcgcggtctccccgggcaacagcaacaccgtcaagggcactgagtcctacctgctgccgtggctgtgggacgtgaacaccggcaagctcgtcaagtcctccgatgagaagctgtaccactggaatacccagggcggcaccaccgagtggaccctgccgaaggattggcagaacctcgcctccgtcaaggtgtaccagctcaccgaccagggcaagaccaacgagaagaccgtcgccgtctccggcggcaagatctcgctgaccgccgaggccgagaccccgtacgtcgtgaccaagggctccgagaagcagatctccgtcaagtggagcgaaggcatgcacgtcgtggacgccggcttcaacggcggccagaacaccctcaaggacaactgggccgtctccggcaccggcaaggccgaggtcgaaggcaccaacaacgccatgctgcgcctgaccggtgacgtgaaggtctcccagaagctcaccgacctgaccgcgggcaagcgttacgcgatctacgtgggcgtggacaaccgcaccaactccccggccaagatcaccgtgaccaacggcaccaaggtcctcgccaccaacgagaccggcaagtcgatcgccaagaactacatcaaggcgtacggccacaacacgtactcgaacactgaaggcggcagcagctacttccagaacatgtacgtgtggttcgtggctccggaaagcggcgacgtcaaggtgacgctctcgcactccggcgcatgcgacaacaccgaccatgtgtacttcgatgacgtgcgcgtgcttgagaacggttacaagggcctgacgctcaacgctgacggcaccctgaagacgctcaccaacgacttcgaggacaatgcccagggcatctggccgttcgtggtctccggctccgaaggcgtcgaggacaaccgtatccacctgtccgagctgcatgacccgttcacgcaggccggctgggatgtcaagaagatggacgacgtgctcgacggcaagtggtccgtcaaggccaacggcctgatccagaagggcacgctgatctaccagacgatcccgcagaacgtcaagctggaaccgggcgagacctacaaggtgtcgttcaagtaccagtccggctccgacgacatctacgccatcgccaccggtgacggcgagtacaacgccagcaccgtcaagctcaccaacctgaagaaggccctgggcgaggacggcacggccgagttcgagatcaccggttccatcaccggcgacagctggttcggcatctactcgacctccaccgctcccgacctgcagaacacgtccgattccgccgccaacttcggtggctacaaggacttcgtcctcgatgacctgaaggtcgagcacgtggcatccgccgagcacaccaaggccgacgccgaggcgaagctcaaggaagtcaaggacacctacgacggcaagagcggcgactactccgccgaagtctggaccacgtacgtgaacacggtggccgagatcgaggcgctcatcgccaaggataagcccgactacaccaccgcctacaacaaggctgtggcgctggccgagtacatgaagaacgcaccgggcgacgactcgaacgatgcgtacgacgtggcgaccgacgcctacaccgtcgaggcgggcagccagcaggcactgtcgggcggcaatgagggcccggcaagcctcgcccaggacggcaatgccggcactcactggcacacctcctggagcgccaacgcagtgtccgccggtaccgcctggtatcagttcaacctgaacgagccgacgaccatcgacggtctgcgttacatggcccgcagtggcggcgcgaacgcgaacggcaagatcaagaagtacaagattacgctgacgctgtccgacggcaccaccaaggacgtcgtcaccaatggcacgttcaccacgaccagcggtgtctggcagaaggtcaagttcgacgcggtcaagaacgtcaccaaggtgcgcatcaccgctctcgaaaccgcgggacagtccgcgggcgaggtgaacacgtacgcctccgctgccgagctgcgtgtcaccacggttcgcgacgtgccgagcaccgaggtcaaggtcaacaagtgcgatctgcagaacctgtacgatgacgcttccgccctgaccgaggccacctacaccgccgacacctggaaggtgctcgtcgccaagcgcgacgccgccaagaaggtgctggacgacgagaacgccaccgcgcacgacgtggctctcgcctaccagaacctgaaggatgccatcgccgccctggaagagcgcgtggacacctccaagctcgccggcctggtcgccgatgccgagaagctcaaggaatccgcgtacaccaaggattcgtgggccgcgttcaagaaggctctggatgccgccaaggccgtcctgaacaatgcgaacgccaccaaggctgacgtcgatgccgcgtacaacgcgctgaacgccgcgatgaaggccctgaagcccgcctcctccaagccgactccgaacccggagacgaccgacaagagcaagttgcaggccaccatcgatcaggccaaggccctggatctgagcggttacacgaagaagtccgcccaggccgtgcgtgacgccctcgccaaggcccagagcgtcctcgccgatgacaacgccacccaggctgacatcgacgccgcgcagaaggccctcgccgacgcgatcgccgcactggagaaggccgatgccaacggcaacgccatctccaagacgggtgcgaacgtcgccgtcatcggcatggccggcatgatgctggtcgccgccgctggcgcggtgttcatcgcccgcaagcgcgccgagtgatataagtaaatagaaaaagggaggtcgccctgtggcggcctccctttttttgtatttggcgcaccacgactctctaccctgccccgctggcgggggcagggtcgtgcataccgtttgtttggtttgtcgtcgaaggggggcgttggtttttcgagggggtcagtttccgggtaggtcgtgcgagggtcgcgcgagaggaaggggagcggtcgtgatgagccgcatctatgagaggacggtcatgtcggtgaccgcgttcgacaatcgggacatcatctcatgcgtgagttgcctcatgcgggcgtatacagatgacagcatgattgacgttgctaccgggaagcggatagcgggtagcacgttttatatgcctagcaaagaatacgaatgccatgatgtcgcttgattctgccgcgtcccgcttgcgagtgtgacggatgttgtttgaacacaaaaggggaggccgccctgtggcgccttccccttttgtgttcaatccgttatggatggtcaggaccgcgtcattctgcccccgccagcgggggcaaatatgtagtcccttgttttatatttcaggcgtagatgtttctcgggcgcatgtcctccggcaggccctccaacagtgtcgccacggagccttcctcgaagacggagcggatgcctgcggctagcagcggcgccaccgacagcacggtcatgttatccaggcgcttctcctgcggcactggcacagtgtccatcaggatgatttcgcgggcgccgcaatcgcgcaggcgctccacggccgggccagacagcagaccatgcgtggcgaccagagtcaccgaggcggcgccggagttgcgcagcgtgcgcacggcctcgcagattgtgccggcggtgtcgatcatgtcgtccaccaccacgcagtcgcgcccctgcacgtcgccgatgatgccatgcgcttcggcatggttcgggcgcgtgatgtcgcgagtcttgtggatgaacgcgagtgggagcccgcccagcttggcggcccactgctcggaaaccttgatgcggccggcgtcgggggagacgatcgtcgccttgtccataggcacgtggctgcgcacgtagtcgatcagcacgggcatggcggtcaaatggtcgaccgggccgtcgaagaagccctgctcctgcgcggcatgcaggtcgacggtgaccagacggttcgcccccgcggtgcggaacaggtcgaacatcaggcgggcggtgatcggctcgcggccctgatgtttcttgtcctgacgggagtagccgaggaacggtgccacgacggtgatggacttggcggaggcgcgcttgagggcgtcgatcatcaacagttgttccatcacccacttgttgatcgggttggtgtggcactgcagcacgaacacgtcggcgcctcgaaccggctccgcgaaccgcacatacatctcaccgttggcgaagtcgtatgcggtggtgggcagcacgttgatgccgagatattgagccacttcattggcaagctcagggtatgcgcggcccgtcaccaaggccagtcgcttatcgggtgtgccctcaaggatcgccgacatgtttttccgctctttccgtcgatagtttcgttaccgttcaccgtggtgatacgttgccgtacacaaaccttatccaatatacaagaacccgccgtcccaagaggaacggcgggttgcgatgctcacggattcttccacttacggcacggtgcgcgcagcaggtgccccgtgccgggcgaaatcattccgatcagtcctcgtccagcgtgatgtccagcttgtcgccgtccagcgtgaactgtccgctgatgctgaagctggtggaactgtccgtcggctcccaggagtcgtcatagttcttgtactcgtacgccaccttggcttcgccgccgtacacgtagaagctgcccgagtcgatgctgaggtcatcagtggtgacggtcgggtattcggtgatgttccatgcgatgttgcggtagtcgtcatcggaaccgtacatgctgaacgggcagccttcaggctgtgcatccgtggacttggcgcaggtatccagcttgtccttgatcttcgcgttgatctcgtctgccagagcgtcggtcggctcggcagagatcgaggcggaggattcggaggaggtggtcagcgtcgtcgaatccgcggtcagatacttcgacgtgaccggttccaccgtgtacgagcccggatacaccttgaaggtgtaggtgccggaatcggatgctgtggcgttcttcgcgccgaccttgacaccgttgacggtgaagttggtgatggccggtgacgcgtagacggagatctccttgaccagcggcgtcgtgatgttccagttcttgaagatcaggaacttggatccgttcggcgcgaccgtcagagtgtcggtcatggacttgccgcccagcgtgtacgagatccgcatcgtgcgggagccgtccgcgttgtcggtggcggagatgatgcgctggttgctgatcgtggtcttgtcgcccttggaagccgcattggtgagcagcgtgcgcttgccgttggcgacctgcggatcggagatgccgttggccttgtcatagtcgccggacgcgatggccgacaggtagctcttcacggtgttatcggcgctgaacacggtggagttgaccactgcgtaagcgataccgagcagggcaagcacgccgacgatggcgctgatgatgatggccagcttcttctgctgcggggtcatggccttggctgcagccggggcggcgggagcagccaccggaacgggggcgacaggtgcagctgcaggagcgccggcaggaacttggacagtcggggcaccaccttgggcctgaaaggccgcggcgtcggtgccggcagcgggaaccccctgaaccggagcaccgggaacgggaacgccctgaaccgggatgccagctgcgggcgcggtcggcgctccggtgccggcaccaggctgtccgccgaaggactgctgcgggccggtgtagccgacggccgcggcgacctgtgacgggaagcgaccgaagtgcgctccgcatgccgccgcatacgcggtgacctcggcgggcgtcgggcggaccgtgccgccgacgaacagcttccatgcgccgcccatcgacagcaccatggccgggccgaatgtcagcgccaccacctcgatcaggaacgaccatacggccgcgacgaggaagtaccatgccgcgatgttcagcgacgcgtcagaggtatcggactgcatggtgtaacccagcgtcgcggacgtgaacaggaacgtgacgatcagccagatcaccagcgtggcgaccggagacttccacgagtgctgccatcccgcatatgccggatcatagatgttgcgggccgcggtgcgcaacgcaatgtagaacgtggtgataaggaacaccacgaataccagccacagctgccacggtgcgctgatggagccgacgtactggttcgagataccgaacagcgacaggttagcgatattaccgctggccgtgatgccgaccgcgccgaacgagccgagtgcgaacgtcaggaacgaaaggtacggcagcagaatcgggaacagcatgaacatctggccgttgtgcaggctgctggacagcatgatcaggcaaatgaagccgatcaccgtgaacacgaccgcgtagatgaacgccgcgtcaagcaacgtgcgcacgaagccgcgcgtgcggtgagcccacttccaggccgcggtgaacacgttgttggaatccgaggcgtactgggcgagcagatagccgaagaacgcgccgatcgcggcgagcagcagcgtcatgaaatacgtacgggcggagacgccggtcaggatgaccttggcctgaatgccgcccatgctgccggctcccagcgccagcgggaagatcgcggcgagaatcagatagacgaatcccatcacgacgccgacgatgacgctgctgacgatgccggtccacttgaaccggatggcgaacttacgcgcgaaccagtatgcgccgaacgcggtgccgagaaccagcgccacgccggaaagaccgacaggcatccatagatggccggacacgccgaaggacgacagggagaggttgcctccggtgatgttgggcgacagttgaccggatacgcccagaaccatcaccagaatcaggaactggaagaagttcggcgtcaccgtgccggaaccgctggcgtcactcatcatgccggacaggccggggaccatgctcagcttggacgcccatgatgagccggccgacaagaagaagatggagccgatcagggccagcgccatcgcgccgatcaagccgaaggcaaggctgattgcggcggtctgcagcgaacgcgcggagaacagctccttgaacatcgggttggggacgaactgctgcggagcgccgggctgaaccggggcgccgggtgcgccgggggtaacgggggcaggtgcgccggggacgggagcaccaggcgcgggcgcaacaaaagtgccgggagccggtgctgcagccgcaacaggtgcggcggcgggaacttctccggccggagcggcgactggcacttctgccgccgggacgggagctgcaggagcttcttgtgcggggactggttcgggaatcgccgggaaggccggctcggccgcgggctgtgccgcgccggggaatgcgggtgccggctcgggctgcggtgccgcggcctgcggggccggtacgggttcagggaatgcggcgacgggagcggatgcttccggctgaggcgcggctgcggtgccgtgtggagcggagctgagcacggtcgaatcttcgacgttgtcgttgctgtttgctgcggcgaccgcgagcgtctgcccgcattgcgtgcagaatcgtgcggcgctggacagcgtggcgccgcagtgaggacatatcataacaagcccctttcttggtttgctcttccctccttattgtacagtcgccacgtcatcttcagcagcttattcgcggtatttgggcggggcatataaggtatgttttcgcccccatcgggcaggtaatccgatatccgataggggcgaaaacatgccaatgcattctctgtgcctgtggcgtcatctgtccatgaatacgttgccgttggcggcgaggcatgccagcacttccggtttcttcatgtcatacgtcgtgttgacggtctctccgggagcggcatgacccattgcgttcgcctccttctcgtattgttcgacggtgtaggatttcggcaccagcccggcgcgcttaaggcaatcgactgccccctcctcatgagacgcatacagattgggattgccgacttgcgccatatacaacgcgtccaccgaatccacggtggcgattccacacgcgttcaagtccttggcctttttttggatgtagtcaaggtcatcggctttatctgaaggcagtatgtctccctgcggctgctggatgccgttggagtaagttttcagtgtcggcctcggatagcccttgtcttggacgcacgtgatgtatcggctccatgcggccttgtaatcggacagacttattttgccgcttgtcgcggccttgcgcagtgtcgctttctgcgcggggtccattccggagtcctggccgagcagctgcgtcgcataagcctgcaaagatgaggcgagacggttcccgcccgagccggaatccgttgcttggttcgtgttccgtgccgtgccgcatccgcacagcatcgcaatggaaagcgtaatgacggcgatgacggcgatggccatcgtcaccgtacgacgggatgccggaatatgccccattcttactccgatctgcatgataatctcctcttcgaaatttcatcgatctttaattttaatatctgaaagacatctcgatcaaatggttgcggacgtcatttggtgtccgtatcgcagtatatttgcaggggaatgctgtcatgcagtgtaacgttgagcgcaggatagtcacgaggagagattatgcggtgttcccgttgtggtgcgaatgtcgttgagggcgatagattctgcgagaactgcggggcgcccgtagccgtgcaggcgggtcccgtgtgcccggtgtgcggtcagcagtcggaacccggcatgcggttctgccagcagtgcggtgccgagctgtccgccggcccgcagcccgcacagccggcccagtcggatgacgacggcccgaccatgctgagtcagtcccctctgctgaagccgccgttccaggcaccgcaagcaggagtgcctggaacggggcaggatgaccagttccagcagaccatgcaatccgattggaccgtgccatctactcagccgcaatctgcgcagccggtgcctgctgcacagccttatcaggctgttcagcagtacgcggggcaatacggtgccgcccagcccggtgccgtcttcccgccgcaggccgtgcagccgccagcccaaccgtcacggcctggagagtccgccggcaagggcaagaagaagaccgcgctgatcgtcggcatcatcatcgccgtactcgtcgtggcgcttgccgccggattcggcgtctggtggttcatgctgcgtgattccggcacccaatcggctcagacgcagtcgacatcccagcagagcggcaagaccaagtccggcgacagcaaggccgcgaaagacgacaagccctgcaccgctgcgcccgatgccgagctgagttccgtcgaccacagcgacaccaatctcgtcgcgcagctgcagctcacttccaactgcgcgtcgacgaaggacggcgacacggcggagttcaaggaatccgacgtcaaggtcagcatcaaggacgatgaaggcaatgtcatcgcctcggccgtcttcgacttctccaagcagccggtcaagttcaatggcgagacggccaacgtcgcgctcgaattcaccacgaggcagtactggcgcccgtacgaccagatcgagaccggcagcgccgaggtcatcctgcagaccggtcagagcggcaccggcgaggcgggcagtgcggacggcgacgcgttggcgggctccgacatcgacagcgaggacgccgagcggtacgcgcagattgcgttgagctggcagctcaagcatgacgaatccgccgcatcccgcttctacaccacctacaccacgcagctgtccagcaagaaaaacgacatgaaggccgacggcaagacctggcattacgtggacatctacgagcagttcctgcagcagcgcatcaagcacaagaacgcgatcctgatctggtccggcgattacccgacgtacacgaaggccgacgcttcgaccgcgtattacgtgatcctgtcgggtgatacggtcgactcggtgaaggccggcgacgcatggtgcaagtcgaacggctatggtgccgcggattgcgcggtcgtggatttgcagtaggacggattacccccccctccccagtcgcttcgcgacagtccccgcaagctgtcgcgggcatggcgtagcttagagaagttgctgttttcagcagcgcgtatacacactcctgccatggatagtccatggccgactagtccgaaggaggtgggtgatgtctgcgcataagtacgaactgatgttcattgccgatcctgagctggatgagcgcggtctgaagaagttgaccgagcagtatctggagctcgtcaccaaggaaggtggttccgtcgagaacaccgatatttggggacgtcgcaagctcgcttacgagattgacggcaagaccgaaggcaactacgtggtggtcaactacacgaccactcccgaggtcagcgccgagctcgatcgtgtgctcaacctgaacgaatccgtcgtccgcacgaagattcttcgtaaagacgccaagtaagccgtatgagtttctgattgttcgcgactcgctgaaccaaaggtaagaaggtaagtcatggcaggcgaaaccatcatcaccgtggtgggcaacctcacggcagatcccgaattgaggaccacgggaaacggcgcttccgtcgccagtttcaccatcgcctctaccgcgcgtacctacaatcgcaacaccgggcagttcgaggacggcaatgcgctgttcatgcgctgctccgcctggcgcgatctcgccgagcattgcgccagcacgctgtccaaaggcatgcgtgtcatcgcgcaggggcgtctccagcagcgctcgtatcaggcgcaggacggctcgaaccgcaccgtcatcgagatgacgattgatgagatcggcccgtcgctacgttacgcgaccgcgcaggtcacgcgcacgtccagcggcaacggccaaggcggattcgccggccgtggcaatggcggcaatggcggattcaacgccagtcagggcaatggcggcggtttcggcggcaacgccggcggctaccagggtggccgtggcaatggcggcttcagcggtggctatcagggtggcggcaatggcggctaccagggtggcgcgtccgctgcgggcaacgccggccagagcgccgcgcccgcgaccgatccgtggggcacgtccggcgatgccggctcgtccttcggttcgttcggtggctcgtccgatttcggtggcgattcgcaggaacccgagttctgatgcccgtccgcggccatatgaagccgcgcgacgcacgtaacaatccagaagcaagcattcaatcgtaattttcaaggagaacatcatgtcacgtaagaggccgcaaccgccggtcaagccgttcaagaagaagccgaatccgctgaaggccgccaaggtcaccgagatcgattacaaggacgtcgcgctgctgcgcaagttcatctccgatcgcggcaagattcgttcccgccgtatcaccggcgtgaccgtgcaggaacagcgcgagctctccaaggcgatcaagaacgcccgcgagatggccctgctgccgtacgccaccaccggtcgctgagttagggaggataagaaatggctgaatccaaggttattctcacccagaccgttgccaacctgggccactccggcgatgtcgtcgccgtccgttccggctacgcccgcaactacctgatcccgcagggcctcgccttcgcgtggaccaagggcgccgaagctcagatcgtgcagatgaagcgcgctcgcctggccaaggccgtcgccacccgcgaggatgccgtcgccgccaaggccgccatcgagggcactaccgtcgagatcgctgccaaggtttccgagtccggcaagctgttcggtagcgtcaccgccgagcagatcgcgctggctctctccgacaaggccgcggtcaacccgaaggccatcgaggtcgagccgatcaagaccaccggcgacttcccggctaaggccgccctgcacccggagatcaccgcctccttcttcgtgaaggtcgtcgccgagtaactccggcccatcagacagattatcgtctgagcttaagcatcagcccctccgccgctccgcgcggcgaggggctttttgtattgttccaagtcgcagcgaatgattctcaataaggaaggtgcgaggattgcgaacatttacgcacaagtgaacaatatgagaaaacgctgttttccaaggatttgcggacattgatgttcatttggagttgcggcgggctcgcacctttcttaatgagaatgatttgctgcgaggatgggcgttctcaagacgcggaagccaagccagccccgttcaactcgttgacagcggcgaacggcatcaccctcaaagccggtgagtccctgctgctcaaggccggcgccacctgcaccagcgcgacccagaccatcgacggcgcctcggtcaagaccggcctgcgcgtcatcaactccaaaggcgccaaggacgcgcccatcaccatcggagcgtacggcgaaggcgccgcgcccatcatcgccggtgcgggcgtcagcgagaccatcctgctgaagaactccgaatacatcacagtgcagggcttcgaagtcaccaacactgatgcgaacgcggccgattacgagaaatacatgcgccgcggcatcgccgtggacgctcggcaacgccgacaacacgaagaacaacgacaccggcggtgtcactcggcgcccgaagtccgaactgaaccagaccgacgccgtagtctccggcgagtacgcggcgaacagctcaccccgtacaagggcgacaccatcaaccagcgcgcgctgtccgcgacgccgggcaagacgtaccgtctcggcctgtgggcgacgcttggcaaaagcaacgacgacaccccgtccacgctcaaggtgcaggtcaagttcaacctcgcgtcgcttggcgccgtcagctcgttcagccagtaccgcaagaccgtgctgagcgagaccgtggacgccgaaagcaaggaaggcggcaaaattcactacagcgggtcgttcatcgtgccgctcgacgtggacccgtatgccgcgctgtgggtcgccatctcacagaccgatctggcctccggctcgttcgcgtacatcgacaacgtcacgctcgtcgaggactccgcggccgtgtccgacgttgcgtcgatcgccgtgaccactcagccgaccaagaccgaatacgccatcggcgacgcgctcgacctgagcggcatggccgtcaccgccacgatgtctgacggcacaccgccgagctcggcgagggcgaatacacggtctccgagttcgactcgtcgaccgccggcgaaaagaccatcacggtgacgtacgccgccgatacctcgcttaccgccacgctcaaggtgacggtgaaggaggccgagccggtcgacaccgtgccgccggtgatttccggtgcggatgacgtggccgtggagttcggtgcgtcgtttgatccgatggcgggtgtgaaggcggttgatgatgtggacggtgatgtgaccggtgccgtgaaggtgtccggtgacacagtggacacgagcaagcccggcacgtacacgttggtgtacacggtgagcgatgcggccggtaacgaggcgtccgtgacccgtgtggccaccgtcaaggagaagtccggcgagacgcccatcgagcctggcgacaaggagcccgacaaggagccgggcaaggataccgacaaggacggtgataagaatgaccaaggcaacaagaagccgggcctgtccgcgactggtgcctcggtgcccgtcgttgccatcgccgcaatcggcctgcttgcgacgggcgccgtgtctgtggcggttcgccgcggtcgcgacatctaaggcgcggatttcctgagtcgcgttggccctgatcggctcagggccaacgcatggcattgatgccggtcgaatggctgtcccattcgaccggcatcttcgtctattttggccttgcccggcgtgattccacgatgtatgtgctgctatcttcgtttcgaggggttgattccactgcctgggaacatctatctgcgtttcagggggtggccaaaacactatgcacggaatatatagggcatttgctcattgaaatcatgcggtttgcgtgatgtttatactttgctaccaaccccctgaaacgcagatagatgttcgtcgcggcctgaatcaaccccttgaaacgcagataggggcggattgcgaggatcacccgggcgggggcatgcttccagtggcgaattaggggtgatttgactcgggcgcaccccctcgacgaaaacaaaaaaggccagaatctttcgattccgaccttgcttgtgcccccgcagggattcgaaccctggacacgctgattaagagtcagctgctctaaccaactgagctacaggggcgttggtcatttcttgagccgagtgacaactatactcggaactcgctgcgatgcaaatcgtcatgtcgcgtacggcgtgtcgcgagtaattccaatgggttccacatgactgcacccaagtgtgcatggcagggcagggtgtgaatcaccggggattctgccgtccaatccgcccgtatcgccgttcgtcaaggggtaaagtgtacaatcacgtcgtttgctttcgcacccagcgaaattgagtcgccgggagtacgaaagaaatccaatcatccagagaccgtgagcagtcagccatgtctgcgatgcggtggagagaaaagaagaagccgtggaatattccctctttaccaagctggctgccgagttcttcggcaccgccatcctgatgatcttcggcaatggctcggtcgccaacgtcgaactcaagaacacgaagggccaccacgccggatggctgaacatcgccatgggctacggtttcggcgtcatgttcccggtgctcatgttcggcggcgtgtccggcgcccacatcaacccggccatgaccctcgcccaggcgatcaacgggctgttcccgtggagcgacgtgctgccgtacatcgtggcgcagctgctcggcgcactgctgggacagttcatcgtgtacctgacgtattacccgcactacaaggagaccgaggacgcggaagcgatcctcggcacgttctgcacgaccgacgccgacaacgacaagatcaactacttcctcaacgagatgtttggcacgctggtgctggtgttcggtgcgctgtgctgcctgatgctgccgtggggttcgaaggatttggcggccgcgtcgatcgtggttggcttcatcgtatggggcttggtgacctcgatgggtggtccgactggccccggcctgaatccggcccgcgacctgatgccgcgtctgctgcacgcgattctgccgattccgaacaagggcacctcgcgttggggagaggcgtggattccggtcgtcgctccgattgtgggcgccatcgtcggcgcgtggctgtacgtgttcttcttcgcgtgatttttgcgcgaaccgcgtgagccgcggcgggctcgcgtgacgccacgcgtgttgcgcggccccacggctgacgggatacaatgctgggagagacgcctgcgaaaagtgtgcccttgtgctcgcgctttcgcggggcggcgcggcttgacctatgacgttgctgggagtgattgaagttgcagcggttgcgtggtgacgatatgcgtcgggtgttccgcacccggcgcattgccgtatgtgcggggttgattttggcgctcgtgttgtttgttcttgcggtgcgggcgagcgtacttcgcgtgccgggcatgggcggtgagcggtcgtccatcgcgcagccaagtgtgacagcgcagccgcagtctgcgggggagcagaagggcggcgattccgcgaaatcgtcggccaccgcgaaatccactaattccgaggcacagtcaaacgggcatgacccctcgaagccgttctcgcaggcgcagcggcgcgagattctcgagaaggcgcagcagaccgcggcggccagcggcaaaccccgccacgaataccattactgcgtgtccaccaaggggagcgtcggcgataccggcgagttcgggcgcacggtgtacgcgacgctgaatgattcgcgtgggtggccccgtgccggtctcacgttcgtggagagcggttccagcaagtgcgacatgacgtatattctggccgcggcggagtatatgaaatcgttttcgtcgctttgctcgtcgcagtacagctgccgcgtcggcaatcaggtgatcatcaattatgaccgttggcgcgagccgaccgacagctggctgaagggcggcggcaatctggcgaattatcgcacgatggtcatcaaccatgagaccggtcaccggctcgaccatcgcgacaatgagaccgtatgccagcaggcaggcaagccggcgccgctgatgcagcagcaatcgatatcattgcgcggctgcacgatcaacgaatggccgctcgactcggagctctgggcgcggtggtgatcggacgattcgcgccgacgccgtccggacgaatgcatatcggtaacgtgtatgcgatgctgggcgcgtggctgtcggctcgtgcgggtggtccagagcgtacaagccggacgggcggtggagcgggcgatgcggattgcctgaataacgtgaatcgcgtggatggcatgagtggcgcagccgatccaggcgatgcggacggcgggcgagggcgcatgctgctgcgcatcgaggacatcgacaccccacgcgtgctgccggacgcggaccgctggatcatggacgatctggcatggttgggactggactgggatggagagccggtataccagtcgcggcggctcgacatctacgagcaggcgttgcgcgcgcttcagggcattgacttgcgagacgctgccgcgttcggtggccgtgatggcgttgacggcaccgagaccactgcgctgatatacccgtgtttctgttcgcgcgccgacatccgtgcggcctcggcgccgcaggagggcgaccgtttcgtcatgtatcccggcacatgccggcgcgcgctcgccgagcatccgcgacaggtcgagcaacgcttggcgaatggtgatcggcattcgctgcgcatcgccatgcctgtcgccggcgacgcgcgtgccgcggtcaccgtgcatgatcgcgtgttcgggaactgccgattcgatttgccgcgcgatttgggcgatacggtggtgcgacgggcggatggtctgttcgcctatcagctggttgtcacggttgacgacttgctgatgggtgtggatgacatcgttcgcgggcgtgacctgttgcgatccgccgcgctgcagctgtacatccgtgagcgtctgctcgacgccggcttcggggatagctcggatggcggcgttgccgcggctcatcgcgatatccgtttcgcacatcttccgctgatcgacaatgcggccgggcggcggctcgccaagcgtgaacggtcgctggatatgggaacgttacgcaaacatggcgtcacggcgcatcgggtgatcggctattgcgcgtggctgctcggattgcagcaagagcccgagccgtgcgctgctgccgacctgttgcatggattttcgtgggatgcgctcgccgcggattcgcaggatcgttccatccccgacgacccgttcagcatcggattgtgagattcctcctctatatgctgcgtgcggagccgtttcgcgcgtcgaccccccgtctcgcatcgctcgacaccccgccagcgggggccacgccggaagttcccggtttctctagccgattcgccctcatccgtggtcatactaatatatggtgcagcaagacggatagggagcatatgatggccgcttacatggatcacaaggatctgaccaatgaaagcatcgacgagacgcgggcgacgcagattcgcgatggcgtgcatcgcgtgcttgacgccatcgccgaagccgagtcggcggccggtcgcgctcccggttcggtgaagctgctggcggcgacgaagacccgtgacgtcggcgagatcatggcggcgatcgatgcgggcgtccgcatgatcggcgagaaccgcccgcaggaggtcatggccaaggccgagggactgcgtcgcctgtgcgcggaccggggatttgcgctcggcacaggcgacggcgacaccactcgactgtctgacgccgaacacatcccgttccatctcatcggccagctgcaggccaacaagatcggtaaaatcctccccgacgtcaacaccatcgaatcggtggacggcgtcgaactggcgcagcgcatcgcccgccgtgccgtcgcccgtggaatcacggtcggcgtgcttctggaagtcaacgagtccggggaggtatcgaaatcgggttgcgacccgcaggctgccgtcgacatcgccgcacagatcgcacagctggacggcatccggctcgaaggcctgatgaccatcggcgcgcacgtcgatgacgaggccacgattcgcgcctgctttgcgcatctgcgcggcacgcgcgacacgattctcgcctctcgtgcgcccggcaccgagcactgcacggaactgtcgatgggcatgacgcacgacatggcgctcgccatcgcggagggtgcgacgattgtgcgcgtcggaacggcgattttcggcgaacgcgcgttcatctgacggattgcggcaggcctcggcggaaaggggccgggctgtagcgcccgcgctgcgctgccggcttctcgactgccgtttgatggtgggcatacgatgggggtattggtgtcggctgacggcaacgtgaggtgagtgcggtcatgaaacgtgatgatatgcgggcgagccgcggtgcgcggcctgacgagagtgcagagggtgccgtgccggtgtcatcgagtgatgatattcgtgtccatgccgtggtggcgggtctggtgcagggcgtcggattccggtatttcacggtgatgaccgccggcaagctcggcctgggtggttgggtgcgcaactgctacgacggctcggtggaggtcgaggcgcagggggaacgcggcaaggttgcccgtctgatttcggcattgaagcaggggccgcgctatgccgatgtcgaacgagtggacgtcaccgagatcccgttgcaggagctgaagccggcccgtcatgggttcccctcgttcggcgtgttctacgagcgatagtttcgggtctattgagacggaactgttccatcggcaaatgatggtaaatgacgttagccgatggttcagcccactgtcagaagcaatatataactctgcccccgctggctggctcttgcgaagcgggcaggagcggtttgcgttcctaagtgcgcgctgaaacgttcagcctgcgaacataagaacgcaaatcgcacgttttgcgttcttatgttcgcgtactcgtcgatacggcgcgcacttaggaacgcaaaagagtccgcgtaacctcacgacgagagcctccctcagtcttgttgtgctttggcgggagcagacacttcgctgatacaacggtatacccttatgtaagaggcctcaggccttgatctaagccgcatctcggtatatttcccaagaattttccccgtagggaagggggtatggcctgattcccgaggaccttatgccgcaagggctgtgaaagcggtttttctgcggggggggggcatgtattcggcgttatttcaatgtttcgggggattgcgtcgatttttgggtgcggatacggtcaggagttaacaggccgatggaagtcgatgatttgcgcgtgctgcgacggtgagagtcgcaatcgtgagtctttgtcgaactgctgaacgccggatgaagagttttggaaatgatggaagggatgcttatcgtgactaagcaggatcggaaaccatcgcatacgagggcgatgcgctctcgcctgatcgcggccgccgtatccgtcgcgaccgttcttggacttgccgtcaccggcactgcgattgcggccgatgcagggacagccgcacccgaagccgcgcagtcggccacgacgcaggcatcacaggccggcaccggcccgatcagcggcatcgcacagggcgacagcgctcagcaggaggcgtcatctgccctgaccgatcgcgccgggactggtgcttcggggcagaccgccacggtcaaagcgtcggctgcgcctcgcgccacggcgaacgacggcaaagtgaagattaacctattcgattattgggacagcagtgatccgaagggcccggcaaaggccgctggcaaagagaacgtgaactatgccacgggcggtaccagcagaaatgaggcggctgcagcattctacttcaactacttcaacggaaaaggtaaggattggaacggctggactggcagtgcagaaacctctccgggcatcgtcaagacgaacctcaccaagaccggcgctgatgcagttccgcagttctctacgatggtgaccaataaaaataatgcacagaccgacatgacgtatttgttcacagaaagcgagtgggccaaggcatataccaatggcggcaatgggctgacggggctgttcgatccgacggaagaggccaagggccactatgtgtacgactccaatacgacgtacgccgcgctgaacagtgccggtaccggatttgaccggtcagcaacatggaccgagagaactgacgcgtggattccgaaattcctgccgttcaatgcggataaaagtcagctgcggatcggctttcattcagtgcgcggcgcccggtacgccttcggtatgaccgcatacgcgaagttcatgcaaccgaaagaaggcaaactcgttgatggttccccgatgacgttcaacttcacgggtgacgatgatctgtggctgttcgtcgacggcatgcttgtgttggatatcggtggcatccatgatgccgccagcggctccattgatttcgcgaccggtgtggtgacgcttgtcagcaataaaaccactacgaccacgttgcaggcattgtttactcaggcgctcaaggaccaaggcaagtcggatgccgagatcaccgcttggatggaatccaatatggtcaaagcctccaatggctcctacaccacgttcaagaactacaccagtcacgagatgaacatgtactacttcgagcgtggccatagtggttccaactgcaagcttgacttcaatttggtgactcttgactccagccatattcaaatcggcaaggagacggagaacgttcctgaagctgacaaggacaagaactatacgttcaacgcttatgtcaactatgagggaaccgacagtgacaaggattacacgttgtacacgggtaaatacgacgtgtacaacaccgccaccggcaccaaggacggtgaaacccggaccacggattccaatggcgtgatcacgctcaaggcgggccagtatgccgtgcttttgggcagcgacgccaagaggatcaccgagtcctcgaagtacaaggtgacggaaatcaacgttgaccaggacacgtatgcggtgagcgccaatggcggtcaggtcaaggtgacgcaggagaaggattctgcgaccacggagccggtgtcggtcggtgaggtgccacgtaccacggtgacgaacacggtcgtcacggcgccccggtaccgcaagtacatcaaggcgaacaatgatggcacctatgacctgtccctgaacgtgaccggcacgcagtccggctcgtcgcagacgaccgtgtccccggccgacatcgtcgtggtgttcgacacctccagttccatgagtggctcgatgggacacaactctcgtcttgaggttgcgaagactgccgtcaacagcatggcgcagcatctgctgacgtctgagaaccaaggcaaggatagcaacatccggatggcgctggtccccttctcgacgacggtgggcaatgtgtcgaacttcaccgacaacgcaatggacatagtcagtgccgttaatggtctgcgcgccgatggtggcacgaattgggaggccgcgcttaaagccgccaatgccaagctgacttccggtcgtaagggcgtgaagaagtacatcgtgttcatgtcagacggcgacccgacgtaccgcacgagttccgtgcggaccggcactgattggtggggccgtccgacctatgatgacgatgatcgcaggggtcttcctgccggggttcatggttctggcagcagtgatcaatatggggcgaatctcagctccgctgttgccgaggctaacaggcgtggcgatgcgacgttgttctcggttggcgtgtcctccgatccgaccaagatgcgtggcttcgccgatcagacgaagggctcgtattacagcgccaccagcacggatgagctgaacaaggcatttgccgatatcatcggtcagatcaacaggaagtcttcgtacaagaacgtgtccatcaccgatacgctgtcggactacgcggagttcgttaatgctgacttcggctcgaatgatgtgacggtgacggcatctaaagacggtaatagtgtcgatctcaacgagagcgattacacggttaccgtttcgggcaagacggtgaaggtcacgttcgcggacggctatgagcttcaggatggcgtgacgtatacggtcacgttcaaggtcaagccgacgcagaaggcctacaacgagtacgccgccaacaaacagaatgacgacaagaccggatataaggatgttcttggtgccgacaacactgatgcggatggtcaccatacttcgtccaatttgcccggcttccattcgaatgcggatcacggcgcgaagctggggtacaccgtcgtcaacacggtcggcgaccagaccaccgagaccccgggttccgtggagtacccccaccccgtcctgcaggtaaagaccggcaagatccaggtgaccaaggactggtccgatggagcggagaagcatgggaatggctcggtgaccgtcacgttgaagcagtgcaatgcgcaaggtgaggattgcaaggacgtcaaccggaccgtgaccctcaacaaccaaggtcagtgggctggcgcgttcgagaacctcgcccctggcacctaccgcgtggaggagtccagagtggacggctacacggcgtcctacaaccccgagaaccagttggtaaccgtcactgccgacgacctgtgggcggctccggataacaacaacatgacgaccttcgacaacgtcaagacgtacccggtcacgatcaccaacaccttcgttgccgtgtccgctctgccgatgaccggcggcgccacgactcgtgactggcttgtgtatgggggcggcttcggcctgctcgcggcactggtcagaatcggatacttcatctggcgcaagcgtcggctcgtctgacctgcggcggatgctccgccctcctccctcgtcggggagggcacacgggggcggcgaccagtcgcccccgacaactcaagatttgcggactgcggaagcctcaacgactgccgcttccgcagttgcaataaacaagacaacgaaaggaagatgagtttctcatgaagttcaagaagcttttcgcgggtgtcgcagctgcggccacccttctcgctggcatggcgttcggcaccggtgccgccaacgcggccgagacgacagtggacactgctgcaacagtcacgttcaaagcgtccaaagaaaagcagctgaccagcgcccggctgagcgcatacaagatcgcggactacgtgaactatggcactgccgaaaacccggtgtatggtgtgaagaccgctgcgggcgccgatcgcgcgaagctggctgcggctctgaccaccgccggcttccagaacgtgccgaccgatggcaccactgatttgatggcttgggctatgaatcaaaaaacgaccacgggtacggatggtaacgtcacgcaggttcagttcgatcagtccgagacccgtccgtggaatgatccgtccgtgacgcgcaagttcgcggatgcgctgcaggccaacaacccgttcaccgccaccgcggatccgttcgcgctgaacacggcgactggcagcgacacggatggttggaccgccacgaacaagaccgcgctgactgctggcgtgtatctgttcctggacggcaacgcatcgaccgataccctgactcaggccgtcccgatgatcgtgagcaccggctccgttaacgctggcgttctgtcgcttggggatagcaccgcagaagtggacatgaagagcacggtgagcggcacccagacgaagtccaccaccagcaagagcgcgtccgtgggcgaaaccgtgccgtttgaactgggctacacgattccgaatccggtcccgaccggcttcaccctgcagttcaaagatgtgccaagcaagggcctgaccgtcgactttgccggactgaccgttaaggccggcgataaggtgctgaccggcaccgattacacggtggaaaacaacctgactgccaacaagggcaacggcaccaatactttcgtggtgaagatcaccgacccggccaagtacgccggcaagcagatcaccatcacctacaacgccaccgtcaatgacgaggccgagacagtcaagggccaggattaccacgcggtgaccaacaagctcgtcgacaatgatggcacccccatccccggcactgaaaccctcaccaagatcttcggcttcaagttcacgaaggtcaacgcccagggtgaggccgtcaagggcgcgaagttcacgctgagtgtcgcaaaagaccagaacggcgtgctgccgaacagcgataagtacccgctcgaagtcacgtccggtgccaacggcgtcgtcaagttcgacggactgaaggccggcagctacaccgtgaccgagaccgcggtcgccgacggataccaggacttcaaggcctcgttcaccgtggccatcgatgaaaacggcaaagtcaccttcgccggcaccgactcctggggtctcgcgcccaaggacagcgccgccgactacaaggtgaccaacgtcaagtccgtcttcgaactgccgaagaccggtgctgcgggcatcgcgctgttcgtggtgatcgctgcgctgctcggcggcgctgccgccaccgtgtacgccaagtctcgccgcgccagccgtgcgctgcgctgactgacacgataacaggccaagtcgccgcatgacgtgcatcccgcacgagcatggtggcggcttcggcttgctgtaaccattcgcccccggcagcacccctgccgggggcaacacagtacatacacgaattcgtttcacggcgattgcagtgacggccggcacaacaacaggaggatgcgcatggcatcgaggagacacggatcgaaacggccggccacctcatccggcaacgacccagccgccaaatcctcccatgcgcccgcacggtcaacgatgacccgcagcctgccggacaatgacgagcgatcctcgaataattcccgtaaaccctaccgaaacagccgtcataaacccgccgtgcagccgcagctcccgtactcgatgctgagcttcaatcaggcgaccgacatctccgaccttgtcgcgcaacgcaaacgactgcgcatacagctcatcatcatgcgcatcgtcacgctgatactggtcatagccgctgtcgccgtcgccggatatcccctagcgctccaataccagagctcgctcaagctcgcccaaacctcacgcaacagcgcacagcaggtcgccggctggccatacccgcaagccgaagacgccctcgccgccgcccgcgcatacaacgcaaaactcgccagatccggtcaacccgtgctgggcgaggccatcgacccgttcagcgccgcacaaggcgggtcgagagccaaaggcgaggactccgctgcctccaaagacaaggaataccagtccctgctcgactcgggcgacgaagtgatgggaaccatcaagatcccgataatctccgtcaacctgccgatctaccacggcacgtcacagaccgcgctggcctccggtgccggtcacctgtacggctcctcgctgccggtcggcggggacggcacgcactccgtcatcaccgggcaccgcggtctcgtcaacgcgatgatgttcacgcggctcgacgagatgaaaaccggcgacttcttctacatcgaagtgatgggggagacgctcggctacgaggtcgaccgcatcaccgtcatcaacccggacgacacgtcgcaactcaagatcgtgcccggcgaggaccgagtgacgctgatgacgtgcacgccgtacggcgtcaacacgcagcgcctgctgatatccgggcaccgcgagccgatcccgatgccggcgccggacccgtccgacctgcatgacacgcgcaccatcgtgacgatggtggtggtgtgcgggctgctcggcggatggctgctgctcggcgtgatcgggcggattcgccggctgccgttcaagccgatgcggcacgcgtcgtcgtggccgcggcgcatgcgtgggtgaggggtgccgggttcacgggggggggtgtcgaggggggtgtcggcggcgtcgccggtgaggtcctcgaaggcggacttgcaaggtcttcgagggatctcgccgtgcgaatcgaacttgccgtgagatgaacatgaacttccggtcaataccgtgcatatcacggaaagtgagtgtacgctgaggattagccgatcaggtgcatacagcgttgcatgtggccggttgcggtaacaatgatttgacccggtcaacggggctctctgcaagagggggacatatgagcaacacgtatccagatggagcgccgcagactccgtatggtgatccgaacaatgctgcgggcgcggaaggtgcgcccgaactgcagccaacgcaggctttcccgccggtgccggtcgttcctctgcccgggcagggagcgggcgcgccgacgggagccccagccgccccgtacgggcagggcggggccccttatggtggtgcgccgactgccgcgtacggcgagtcgctcgccgggccgcagggcggcgtcgagccgtatggataccaggcggcgccgtatgggcgggagccgggagcgtacggacagtcgggcgctggctccgcatacaaccagggtggggctccttatggtcagcagcctgaacccggtccgaaccccttcagccagcccgatggcggaactccgtatggtggcgaggcgcctaccgccgcgtacggtgagccgcttgccggcgatgctccgggagggtacggtcagccggccgcaccgtacggcggcgagcagccgaccgccgcgtacggacagccatacggcgccaaccagtacggtggcccgcaatacgggaaccagccgcccgcaatcgcgccgcaaggctacggcaatccgtaccagcaggaaccgccgaagaagaagagccgcggcccgctcatcgccggcatcaccgcaggtgtcgttgccgtcatcgccatcatcgtcgtagtcgtgctgttcgccaccggtgtcatcggcggcaagaaggacagcagcgccgacgcgaaacccaacacgtccaccagccagacgcagggcgacagcaaatccaatggcgacagctccagcaacggcaactccgacggatccagcagcaacgatctgaacaaccttgacgacgcgttgcagaacggggccgacgacaccaacaacgatctcaacaacgacagcttcaacggatcctccagctccggcaagccgtcactggaagagttcgtcaactccagcgaaatccagtcgcagctcgacagcatgacctcgtcgtaccagggcatgggcatcagcatcaaggcgtacgcggaaggcaacacgctcgtgtacgactacacgctgtctgacacgtacagcagcatgggcgacatgatgacgtcgagccttgacgggatggacagcacgttcaagtcggtggcgcagacgctcaacgaaacctgcgacaccggcggcaacgccaaggtgcgcgtgtacctgcataccgaaagcggcaagacgctgttcgacaagagctacacggagtaagcgggtccagctcgcgagaatccgacaaggcgggacggtcatgattggccgccccgcttttcgtatgcgcgtttttcgtaaggattgcactcgcactggtttacactggtgagtatgagaatcgcacgtttttcactcaacgacaagccgcgctatgccttcgtccagcaggacccggccgacggcaaggactacctgatcgaactggacggatacccgttcggagccgcgcccgtcaagcccacaggggagcggtacgcgctcgacgccgatgggctgaggctgctcgcgccggtgattccctccaaggtgtacggtctcgccaagaactacgaggcgcacgcgcagttcatgcacgagagcgggcactccgagattgctcacgcgccggaagacatggtgatcttctcgaagccttccacgtcggtgatcgggccggacgatccgatcgtcatcccgtcgtattcgaacgatatgaacttcgagcccgaagtggcggtgattatggggcgtatcgccaagaacgtgccggtcgagaaggccatggactacgtgctgggcttcacgtgcgtcaacgacgtgacgctgcgtgacctgcaggggctggatccgatgtggacgcgggcgaagggcttcgacacgtcctgccctatcggcccgtggattcagaccgagctggactggaaggacgcgaagatctccttcacgctcaacggcgaggacgtgccgatggcaagcggcaccactgcgaacctgattcacggcatccccgagcagatcgccgcgatttcctcgttctcgaccctgctgcccggtgacgtcatcatgaccggcaccccgaacgcctccggtcacctcgatcccggcgacgagcccatcgtccacgtagccggcatcggttccctccgcaacgtggtcgtgcgcggctaggcgacagcacagtgtgctgtcgcggcgcacgagccaagcgacagcgaggccagattgggtcggccgcaggccgtccgaaattgcgggaccgtgcgcggcattgcccgtcgcctcgaccgggacgttgatgattggctcggggaatccataccgtttgagcagcagacgcaagtgggtctcggccggggagtcggtgttctcgcgaatctgggtgagtgccctgatgcattgtttttgcccctggaacgagtcgcatgagtggatgaattttctgagttcggccagagtggtccgtctgcgtgcggggtcgcggcataccagcgagtcgccgaattctatgaggtcttcgagggacagctctttggccatttgggcgaacagcgcctcgggggaggtgcataggagcccatgcacctcgatggttgcgcccgaggcgtccgtattgggccgtacgcggggaatgatgtctttcgcgcgcgtccgccgcgtggttttgaacgtgacagtcgctgcggggcggttcttcgttgatctcaaacatgaccgctctcaaaactcgcagatacgagaactgttttggcggaaaatggcggtttcgggtttcgtatctgcgagttttgagagcgtgtcgcacggattcgagttatccatattgcgttttggcgcttcaaaatcagtgcaaaacttgagtcgcgtgcgctcaactttcgggaatagaatgggtgccgaatcggttgtgcgtatcagacacagacggaaagcgctgtgcggggcggttcggatgtcgtgggccgcggccgccaaggcgtatgagacatacggaggttgatatggaacagaagttcaccaccatggcccaggaagtcatcggtgatgcgattcagagcgcgtctgccgcgggcaacgcgcaggtcgagacactgcacgtgatggatgcgctgctgcgtcaggaaaacggcgtgattcagggactgattcaggcggcgggcggcaacccgcaggcgattggcgccgcggtgcgcaatgctctggtcaagatgccggcggcgagcggttccaccacatcgcagccgcaggcgagccgccagctgacggcggcgctggcacaggccgagaaggagatgcagcagatgggcgacgagtacgtctccaccgagcacttgctcatcggcatcgccgcatccgcgccgaaccagagcgcggacatcctcaaggcgaacggcgtgacggccgtggcgctgcgcaaggccgtccccggcgtgcgcggcggcgccaaggtcaccagcccggacgctgagggcagctacaaggcgttggagaagtactccaccgatctgaccgcccgcgccaaggagggtaagctcgacccggtgatcgggcgtgatcaggagatccgccgtgtgatccagatcctgagccgccgcaccaagaacaacccggtgctgatcggcgagcccggcgtcggcaagaccgccgtcgtggagggcctcgcccagcgtatcgtggccggcgatgtgccgaccacgctgcagaacaagaagctcatcagccttgatttggggtcgatggttgccggctcgaagtaccgtggcgagttcgaggagcgcctcaagagcgtgctcaacgaaatcaagaacgccgacggccagatcatcacgttcatcgacgagattcatacgatcgtcggcgctggcgcggccgaaggctcgatggatgccggcaacatgctcaagcccatgctggcgcgcggcgagcttcgcctgatcggcgcgaccacgctggacgagtaccgcgagaacatcgagaaggacccggcgcttgagcgtcgtttccagcaggtgttcgtgggcgagccgagcgtggaggacacgatcgcgattctgcgtggcctgaagcagcgttacgaggcgcaccacaaggtgacgatcggcgacgacgcgctggtcgccgccgcgacgctctcgaaccgctatatttccggccgtcagctgcccgacaaggccatcgatctggtcgatgaggcggccgcgcacctgcgcatggagctcgactcctccccggaggagatcgacgagctgcagcgcaaggtcacgcgctacgagatggaggagatgcagctcaagaaggccgaggatccggccagcaaggagcgcttggagaagctgcagaacgagctcgcgaacactcgcgagaagctgagcggcctcaaggcccgctgggatgcggagaaggccggccacaacaaggtcggcgacctgcgcgcccagctggacgccaagcgcgtcgaggctgacaagttcacccgtgagggcaacttggccgaggcgtcgaagatcctgtacggcgagattccggcgattcagaagcagctggacgcagccgagaaggccgatgcggaagacggcgcgacgggcgagaccaagcccgagccgatggtgcccgaccatgtggacgccgattcggtggccggcatcgtctccgagtggaccggcatccccgtcggtcgcctgatgcagggcgagaacgagaagctgctgagcatggaggactacctcggcaagcgcgtgatcggccagaaggaagcgatcgcggcggtgagtgacgcggtgcgtcgttcgcgcgccggcatcagcgacccgaaccgtccgaccggctcgttcctgttcctcggccccaccggcgtgggcaagaccgagctcgccaaggcgctcgccgacttcctgttcgacgacgagaaggccatggtccgcatcgatatgtcggagtacatggagaaggcgtctgtgagccgtctgatcggcgccgcgcccggctacatcggctatgaggaaggcggccagctgaccgaggccgtgcgtcgtcgtccgtactcggtggtgctgttcgacgaagtcgagaaagctaaccccgaagtcttcgacgtgctgctgcaggtgctggacgacgggcgtctgaccgacggccaaggccggactgtggacttcaagaacacgatcctgatcatgacctcgaacctcggctcgcagttcctggtgaaccaggacatggacgcggacgccaagaagaaggccgtgatggacgcggtgcacatgaacttcaagccggagttcttgaaccgtctggacgagatcgtgatgttccatccgctgacccgtgaggagctgggcggcatcgtcaacatccaggtcgctcaggtggcctcgcgtctgacggatcgccgcatcaagctcgacgtcaccgacgcggctcgcgaatggctcgccaacaccggctatgacccggcgtacggcgctcgtccgctgcgccgtctggtgcagaccgaggtcggcgaccagctggcgcgcatgctgctcgccggcaaggtacacgacggcgacaccgtgctcgtcgaccagaccggtggcgagcatctggaactcggtaccatgcccgaggatccggatgccggttccgatgccgacgtcacggtcgaagacgtcaccgaagacaagtgatggccgggtgatggccgcataatgactgagccgcgatgaggggaggccgggctcaatacccggtttcccctcaatgcgtcataagtgcgtcacgctgtgcgggtcgcgtcacgcggcgagcgctcgcacagcgtgacggttcgtgagaagccttatttttcaacgttcttggagtatgcgtcactctgtgcgttcgctctgcgtgacgtgacccgcacagcgtgacgctgcatggtgcgtgtgtaggcgctgtggtgcccggattcgcgcgtaagtccgaacgcgccgcgacccctattcgccgaccgcggcgcgctgctccacgaactcgcatccagctatcgcgcgggccatggcgtcgcgcatggtggacaggaacacgccgtcgcgcgtgaacgccagcgcctgcacctcgatgccgtacggcgaaaaaccggtgagcttgacgagtggttcgctgccgggttgcgcgaattcggcggtggccgtggccaccgcgcgcttcaccgcctccgtcacgtgcgccgggtcgctgccggccttcgcggtgaacgtcatcgtcacgcatccttcattggacggcgtgagcttctccagcgacgcggtgttgagcacggaattgggtatgaccatctcgttgccattgcgctcgcgcaccaccgtctgccgccacgtgatgtccttgaccacgccggccgtccccgcgaccgacaccagatcgcccggctgtatcaccttgccaagcatcagcccgaagcccgagatcacgttcgccacggtgtctttcagacccagcgacacggcgatgccgccgacgccgagcgcggtcatcagtgttgtcgggctgatgccgaacaccggctgcagcacgatggacgcggccagtatccacaccagcacgcgcatgatgttgatgaatatcgacgcgctcggcatgtccgtccgatccagcaccttgcgcatcactcgtgccagtcccttggtgatcaacagcgcggcgacgatcgccaccagcaggaagatgattttcccggcgttcgcctcgaaccattgcagtatctgatccatgtcgcctccagggtcgcgtccgcgtcgcgcaccccgcggcggcgactgctctgcaagccactttagtgggcggttttgaaatctcctggaatgtcgcctttgaaaatgcggctccagtaggccagcatgttctccttcgacatcgacaggtacactcccatggcgagcacggcgacatcctcgttgagcaggtcgtcgaccgagagtctcttgctcagctccggccaccgccgcagcaccgcgaggataccgccgacggtgaagtcgagcatcaggtcggttttcagatccaggttgtcggcgtcgagctggaggtcgttgatgatcatcagacggccgaagtccttcagtgactcgatgagctcgggcgagctatggctgccggcgagcagtgccagacggtcgagccgctgccgctgaactgggtcgttcatcaccagggagcattggcgcctccattcgatgtcgggattgaggtcggcgcgtggcgcctgcacggtcgagtgctctacggcgtgcatgatcgccgaatcggccagctccggcaggctggcgtaatggtagtagaacgagttgcggttgacatgcgcctcgcgtacgacttcggtgacggtgatcttgcggtattcgtggtctgcgagcagctcccagaacgcgttttcgaggcgttcggtcgcggagagtatctcggaatccttgcgtgggcgcggcatgatggttcccttcctgcgtgacgtgcggctatcgtttattgggcactatgtctatatgtgtgatatggattattgtagggcggattgtgaggcggatgatcggaaaataggcgaactgtccatttttctcggttggcgaaacagggttcgggcacgagacggctaccgcgaggaacgggaccggaccgcggccatgagcagccccatcgcctcgatcagatgacggcgatccgtctccgacagacccacgaacgtgttgatcatcgtgggaacggccttcaggccggccgccatgagatcggaaatgctgtcggcatggctcgaccgcagcacggagaacagggcgtccaccgcgcgctcgcggtcctcggtgctcagcgattccagccagccgttcaacgaccggttgaacagctgggaactcggcgacacctgcggcagatattcgaaatcattgcccgagacctgccaggagaacgtcagatgctgcatcacgcccttctgatcggagcgtacaacccgcaactgcatttgctgttcctcgctgaaatgctcgtcggatgcgtccacgcgaacgcaggcaaagcgcggattgactccgatggcggcgtacagctcctgcgtcaggcgcgggtcggcgaggccattatggccgctctccacatgaaaatcatcgggggtcagcgcctccgacaccgaagccagcgttgcgtcgccgaactccggggcggccaaatggcgaatcgagcgcaccggatgacgcacgtcgatgctgctcagacgtctgcggaatgtgccggatcgtgcctcgacagcggccagagtccgcacgcatgccggcatgtcctgatagacgagcgacgccagcaccagcgcgtcgacggcgttgaacggtgcgtcgacgccgaacgggcgggtctcggaacgtgcataatcgatgatgttgggcgtcgtgcgcctcctttccgccgcggcggggctatgcttgtcgtccggagccgctaagggccgggcgggtgaccggttacccgtcaatatacccggttcccaacccgcgcgaacccaacaacaaccggcgacatgccctgttgtgcgtggtcggtggtaaaaacgaaaccagagtccaacggggaggttgtgccatgatcaacgaaacatacaaagccatgctcggcggcaaatcggtcattcgaaccctgagtgaatacgcgaccgcaaggggcaccgaaatcggatacgacaacgtgttcgactattcgctgggcaacccgagcgtgccgtgcccgtccagcttcaccaaggcgatgatcgacatgtacgagaccgccgatccggtcgcgctccacggatacagcccgtcgctgggcaacccggaggcgtgccgcaccatcgccgaaagcctcaaccggcgtttcggcatggattacacggccggccacatcttcccgacgacgggtgccgccggtgcgctcgcccacgcgctgcgggccgtcaccaagcccggcgacgaagtgctcacgttcgcgccatacttccccgaataccatccgtatgtcgaaggcgcgggcgcgcggctgactgtcgtgcccgccgacatcgagagcttccagatcaacttcgcggcgttcgaggcggcgctgaaccccgaggtgacggtcgtgctcatcaacacgccgaacaatccctccggcgcggtgtattcggccgaaacgctcgaccggctcgcgggtatcctgcgggcgaagcaggccgaatacggtcacgacatcttcctgatcagcgacgagccctaccgcgagatcgtgttcgacggcggcacgcagccgtacccggccaagttctacgacaacacgctgacctgctactcctggtcgaagtcgctgagcctgccgggcgagcgcatcggctacgtggcagtcaacccgcgggcgaccgacgccgaactcatcgtgccgatgtgcgggcagatctcgcgcggcaccggccacaactgcccgagctccagcatgcagctcgccgtggcgaagatcatcgacgagaccagcgacctgagcgtgtacgagacgaacatgaacctgctgtacgatgcgctgacctcgatcggcttcgacgtggtgcgcccgggcggaacgttctacatcttcccgaaggcgctggaagccgacgcgaacgccttctgcatgaaggccaaggaatacgacctgatcctggtgccgtccgacagcttcggcgtgtccgggtacttccgcatggcctactgcatcgacaccgacaaggtgaagcggtcgattccggtgctggagcgcttcgcgcgcgaggaatacggattgtaggcgaaaccgcgctctcaaaactcgcagatacagccccaaaatgtcgattctggggctgtatctgcgagttttgagggcgcgttccgtctaagagcatccagaaagcatcagaaaacattcggaaaccgttccgcaaggttgcaggacggttcaacgtcaggcgcaggggccgctaggaaagccgtcgttcaatggagtcaatccaaggaaaggacgacgaccatgaaaccccatgacatgcaaccccatgcgagccccggcggctcgcggcggcgtcgaccgccggtaatcgcgacgaggcggatggtcgccctcacgggtggcctgtgcgcgggcgccggcggcatggtgctgattcggcacctctcggccggttccgctggctccgcctcaaccatgcagccgccgagcggcaacttcggtggcagcgccaacaccatgcaatacgactattccggcagctactcggtgtcgctcaccgtcggcgaagactccaccgccgtcatcgacggtaccgacatcaccgtctccagctccgggtcgaacggcgtcttcgccaccgattccgggacggcgctcgtcaacgacacatcgattgagaccatggccgacaattcacgcgggctggacgcgacctacggcggcacgatattggcgaacaagatcaccgcggacacgcagggcggccacagcgccatcgtcgccaccgatcgaggcggcggatcgatctctctcgccgatgcgacgctgagcaccgccggctccggctccccgctgctgtattccaccggcgacattcaggtgaacaacgtctccggaacctcatccggcagccagatcgccggcatggaaggcctcaacacgatcctgatcaaggattcgacgttggaaagcacggtcaccggcaaaaccgcatccgacccgatcgccaacggcatcatcatctaccagtccacctcgggcggcgtgaccgccgacacgatttccagtgtggacctgtacctgctggacggcgccgcatggatcggcgcggcgacgatcacggacaacgcggcggccggctccggcacgggcacggcgagcgacgcccccatcactgtgaatgtcgacggcacgtccacgtggggggtggcgaaggatacgaccatttccgcgctcaacgtcgcttccggcagcgatggcaacaccgtcaccatcgtggcgaacggcaagaccgtggtctccggcagcggcgacgtgaccgtcacggtgaccggctcgtattcgacctcggtctcggccgggagcgacacggagctgtcgagcgacaccatcgaccgcagcgagttcgacagccggttcggcacatcgacagcgtggacgatggcataaccatggcggcgtgccagacatcaacatcagcaatcacttcatcagtcagttgtcaaaggagtcatcatgaccagcaacaacagcaacaatgtcaacaatgcgaatggcggcgagagcggcaacggcgcggatggtgccatcgagggcgtcgctatcgaggcggcggcgaacttcaccggttcggagcagcgtcaagcggctgtgaatgacgccgctgtggctgatggttcggtgactaacggttcggcgggcggctggggcgtggagcccggttccgcggctggtcgggccgatggtggccgggctgcggcagataacggcggtacagacgagtatgcggggaatcgtgcggctggtctgggagatgccgaatgggctgccggggccggggctgctggatgcggaaccgccggatacggctcggctgggtataggctcgcggcagctccgggcagttccggctatgcgccgaacggtccgatgccggggagctacggcgagggatcgcgtgcggcgtggtacgcgcagaatgcgccgacgcaggcaatgaatccgcagccggggaatatgcaagcggtgagtggccagaacatgaacgcgcaggacgcgaatatgcagggcgcgaatacaccagatgcgaacgcgcagggcggccgaatgccgttgtatgaggattggaacggccgggggccggtgcctggatcaatgggcggtcaggtcccgacactgaaaggctcgaagggcggcgaacacgcgttgagcggtaagacgtgggcattgctcgccgtggtgtctctggtctgcggcctcgtgggcggcgtcggtggagcgctcgcggtgaacgcgctgaccgacgacgaagatggcacgggcagcagccagcagatgcagatgcccggaggcatggggcagccgcccagcggcggccaattcggcaatgggcagtttcagcagtatggcggctcagggaagtcggacagccagctcggcagtggttccagtggctccggcagcagctccagcggttccggttcctcgtacagctccgacggcagtgatgcgaccacaatgtaagccatgagccgcgtccaaacgcaatcgcgtccaaccgcaatcgctgccccctgtctgccccctgtctgcccccatcatcctcgtcaaattacgggttgaaatagccgttctgggcaattccccgtgtgaaatcgccgttttgagctcgaaaaacggcgatttcacacggggaattgcggatttcggctatttcaacccgtatttccgcgttctgttcgccctccacagcccgtaaatggcccagccggtcgggctttacggctcatccggccagcgcatcgctgacgaatcggtcgaccgtcgaccaatgcggcccttgcctcctcggctgcatcacggcgcacgccctccagcttggcgccgggaaccttaccggccctgaccagtttcatcatcgaaagcggcgcctgcgtgtcaaggacgaatcggaacatgaacgccgacgtggccagcgtcaacgcgcctgcggacgtcgcggcgatgccggcgattcggcatccgcgccgtacccggccggcgcgtcgcgagcgaaatgagtcatgccgatgcgcgaaagcagccggcgcaaacgcagcgcagcttcccatgcggataccctgtgccgactggattccaagccagctgcacggcccaagcgcggccggcatgcccgggaagagcgcgaaaggcgaaaaatcctcacgacctctagcgaaccgcgcgaacggttgttagtgttgatgcacagacgatttcggtcgccgcggcgcgccgaacgccgcatataccgcttgatgcgcaccagacgtagagcggcggtctccaaaaccgcaggtcgttggttcgcagccaaccgcgtatgccagtcacttgttttttcggggtctgcctccgccgacgccccgaccgggacgcttcgtgttccatccgtctatcgtctccgggagccagccgcgcgtgcggcctatcatggcgtcgggttcggggagcttgaggttgagcaggccgccgctggttatgccgaggcgttcggcgacctgcttgacgccgagagatatgcagtccgagaacacgcgacacgcagtgaatcttaacgaccgcaggactaggcaaacaacaaatggcactacgcagatgctcatacacccactgccacctgcccgtcacccgcggccaagcatgggacctcggacataacgaccggcgcgacggatacaacggacccgaacacgcgagctgcaaccgcaaagcgggagcagccaacagcaaccgcatgcgcgaacactggaacaagcaaacaggaaacaacgtggcgactgcaggccgggtgagcctacttcttcttcggcacgtagatcacagtgtcgatcagttctcggtagtgcgcgacgatctgcgcgcggcgggtcttcaggctggccgtcagcatgccgttgtcttgtgtgaactcgtcgggcagaatctcgaacttgcggatcgactcggcgcgagacacgccctcattggcctgattcaccgcacgctcgacttcggtgtgcacgatcggattgcgggccagcgacgccaggtcggactcctcctgagcgccctgcgatttcagccacgcgttcgcatcggcgagatccaatgtgaccatcgcggccacgaacggcttccggtcgccgatgaccaggcactggttcacaaccggcgatgtcatcacggcggcctccaacaggccgggggagacgttcttgccaccggcggtgatgatcagatccttcttgcggccggtgatcgaaatgaagccgtcttcgtcgatgtcgcccagatcgccggtgtgcagccagccgtcgacgatctgctcggcggtcacatcgggatggttgtggtatccgcggcagaccagatggccgcgtacgcacagttcgccgtcgtccgcgatacccgcggtgacgccgctcatcggcatgccgatcgtgccgatccgattgttctccggcaggctcacgcacaccggcccgcaggtctccgtcatgccgtagccctcaagcagcggcatgccgatgccgttgaagaagtgcgaaaggttggcatccatcggggcaccgccggtgatggcgaagtcggcgttcggaccgaaaatcgtgcggatcttcttgtacaccaccaactcgtagaacccgtgggcgaggcgcccccgccacggcagtttctcgccggcctgctcggccttcgaccaatcccgcgccacgtccgccgcacgcaggaacatcttgccggcgatgcccttgccggcgcgctgcgacgctgcgttatacaccttctcgaacacgcgaggcaccgccagcagcagcgtcgggccgaacgactcgaaatccttgacgatcgtcttcatatcggaactcagtcccaacgtcagcgtgccgcagaagctcagcagctccatgaaccgcgcgaacacgtggctcagcggcaggaacagcagcagacggcggtcgggccacgcgcaggcgcggggcatgtactgcatggccgacaggcacaggaacgccagattgcggtgcgacagctccacgcccttgggggtgccggtggagccggacgtgtagacgatcgtcgcgaggtcgtcgccgtgggcgtcgttcttgcgcgcccagaactcctcgtcgctcacttccttgccatacgcctgcaaggcttcgagcgcgccggcctcgatcacgaacaccttgcgcagcgactgcacctcatcgtggatggattcgatcttgtcgcgctgcccgtcgtcctcggcgaacgcgatcgtggcctgcgaatcgttgaagatccagctcacctgagcgtcggaattcgtctcgtagaccgggacggtgagcgccccgaccgccatgatggccatgtcgagcgcggtccattcccagcgcgtacgcgacacgattgacacggcgtcgcccttcttcacacccaagccgatcagacccttgcccagggcgatcaccaggtcgcggaactgcgtcgcggagaacgacttccagccgccgtccgccttgtattcgacggtcgagccgtccgggtcgcgctgggcgcggcggtcaaggaaatcaaacaggttgatatcgtcgtcgatcggttccttcagcggattggtgaactctttgaccatggtcgaggaatttactgtcatactctcttgaatactctcagcgtggtacaaaaaccgcgcgacaggcggcattcggggggggggcggaggggtcggggagggaaaccgagcatgcggcgcgatgatgtcgcattatgtgcgtcgcgcgtggccggggctgtacgatgggggcaggtttgccggtatcgcgccttcggtggcgcggcgcggtgattcgtggccgatgaaggtgacgggcggaataggcgaggcgcgggcgagatgcaggcgagcggcatgagccggagcgaagcggcccgagccggacgggagcaatcatgaacatgccgccgggctggtatccggacccatcgggcgatccctcgctgatgcgttggtgggatggcgaggaatggaccggtgatttcgcgccggcgcagcaggtgacgccggacggcaaccgtattcgccgggcgcgtacccgatgacgaatggcgaccgcaacctgcgtctcgctgcattcatcctcaacatcatctcgatggtcgcgttgggatggacgttgctcccgctggcatggataatcccgatgacggtgatgagttggggcatctacaagggcacgcgggccaacaccgtggcgttcggcgtgtgcaacctgctgttcgtgaataccattgggggggctgctcatcagcaacaaagagcggtgaccgattccgcggaatttcaggcgtgtcgcgatttttgtcccgtttgtacaggcggtcgggtaatgtattcccctgttgcctgtcaaggtgacattgcggacatagcttagttggtaaagcgcaaccttgccaaggttgagaccgcgggtccgagtcccgttgtccgctcgcagattcggctggctgaagcgattcggccggtcggcacgcagacccgggcggttggcgcagaggtagcgcacttccctgacacggaaggggtcacaagttcgaatcttgtatcgcccacggatgccgaagttcacttcggtgtgcactgggtgattggcgcagcggctagcgcacttccttcacacggaaggggtcgtaggttcgattcctacatcacccacggccgctacggtggtcggttttcggggctatggcgcagctggtagcgcatctccatggcatggagagggtcaggggttcgaatccccttagctccacagaacagaacgcccctccttccgggaggggcgtctctttttttcgagcctataatcgcaggcgaggatcctcggcttcgacagctccccggacatgatcgcctcggcgcgcaagctctgccccgactgcgatttcgatgtgctggacgccgggtcgctcgacgagctcgacaccgatttcgatgtagtcttctccaacgcctgcctgcaatgggtgccgaatcatgaacgggtgctgccctccatgctgcgacggcttaacgccggcggcgtcgcgtcggcgcaattcaccgagaacatcaacctgccgccgcacatcatcatgcgcgagaccgcgtgcgagccgaaatggcggcagtggatcagcgagatacgccgctactacaatctcggcggcgacaatttcgacgtaagcgcatactatgatctgctcgccccgctctccgcgcacgtcgacgcgtgggagacgaactactaccatgcgctgcctgggtatgaggcgatcctcgactggtatcgcggtaccggtctgcgcccgtatctggcccagctgcccgatgacggcctgtatctgcgagttttgagagcgtcggttgagcgagccatagatttttcatatgcccgcggtcttgtgtcgcgccctgcgacgtgcttcgatggtgggtgccggcggcaaggggcttcgccggtgccatatcgatggttcgcacgtcaagaagggggttgtgatggtgtccaccacattggacttcgccgagaagtacctgctgaaaaccgaggtcaggaccgtcgcggtcatgcccggcgacgatgattcggtgcgtgatgatgattcgtacgacgcatagtgcggtgatcgttctcgatgatgtttgtgcgaggatgactcatattcccgcacaagtgcgcatgatgcggattcccggaatcccgagacttgctttcgcttgatgcccgattggcccggtatcatactcgcgcctgtatcattgaggacgattcgttgcatatcttgccaccgggaagggtcatcatgggacgcagtcggtgatgcatttccacgtgcacttaatcccgcacagatatggggacggattggacacctggcccaagctgccgggccgctcgctcgacctcgatacggcatggcggcggttgaggcggggaaaatcgacttcgtgaggattgtgatataggacatcaaaacggcgggattccgccgatgcaacctgtggttgcgcacggttgcggggcatggtcggcgattgcaaccgtaagatggtggcggatggcgtggacggcgtgccatagtggggtcatcggccgaacatgacatgatggaatcacttgagaagggatttgacgatgagcttccgcaccaacctgcaatacctgcgcgcccaacgcaacatgacccaggagcgactggccatgctgctcggcgtctcgcggcaggctatttcgaaatgggaatccgagaaggcctaccccgaaatggacaagctgctcatgatctgcgatctgtttggctgcacgctcgacgacctcgtgctcggcgacgtgagcgtgagcaccagccggccggactcgcacggcgcatcggcaacaggctgcggcacgactgtcggaggcaggaccggtgaagatgccgggagccctgcacatgcggggaacgcgaagggaagtataggcgacgccgacgagcccgcgcatctcggtgcggccggtgccatcgagccaagcctcacgggcgtgccgaccggcgagacaccgtacggaaccggttcgccccgccccgccgtgcacgccaatacggccaccctgccgcaggacctgaccggctacgacgagcatcgccgccggttcgcgctgctcatctccggcggcgttgcggcgatcatcgcggcggtcggtatctgcaatctgttcgattcaagcaactccatcctcggcgtgacgcggctcaatgacttcctcacgttcctgtgcatctgcataggtgtgatcgccgggctggcgatgctggtcccgggcggcatgtcgcacgccgagttcaaacgccgccatccgtatatcgaggatttctacaccgatgaggatcgcagccgcgagacgcgtctgctggtggtcggcatcgtgggcggtatagcggcaatcctgatcggcatagcggtgactgtgtacgccgatgacgtgttgggcatcagcgatggatggccgaacgcgatcatgctgatgctgtactcggtcgccgtcttcagtttcgtttactgcggaatacggcacggcatgctcgacatcgacggctacaacaagaaggccgataccgatggcaagaaagagcgtgcagccgggcatgatttctacgacaatctgaccggtgcggtatgcggcatcatcatgtcgctggccacgataaccgccctgtgcctactgtttctggggccgtggatgctgcatgacgactggagctccgtgggcctgttctggctgccgtggccgatcggcggcgtgctgtgcggcatagcgagcctcatcatccagctggtcaaggattatcgcaggcgcaacgacgacggacaaggcgccgggcagcccgggcggacgaaatagcaaggaaaggacggccgatggatgatctcgccgcgtctcgtgagcggtatccgttgcaaaccatgcgattgccggatggcgaacccttcgcataccggtatcatcgcaatccctccgcccgcgcaacgattgtgctcctgccgggcggaatcgggctgtccgactgttctgcctgcattttgaacggttcgtcgaggactgctcggtcatcaccttcgattatcaggagcggttcgcgacgaacgccgaactggcgcgtgccatcgcaagtggaagcggacgcttcgcctgatatcgatgccgctgcaccggcgtctgatggcgtgggccgtgatgcgcaagacgcaagacctgtcgtctggcgaacggcggctgatgcagggcctgtgcgatgtcctcaagcagttgctgagcaagccgtatcagcggcatatggccgatttgctgatcgatgctgcgtcgcacgccgacatggtgacggcggtcatctcgcgctgttggtgcgcatggacgagtgcatggataccgtacgcgccttcatcgggtcgcatgcggcccgctcttagcaggcgtctctagtctcgcgtcggatccttctgcagaagcaggaacacgagcgccacgaccagcagcagcaccgcgatagacagcacgccgagcgaggctcgtggtctgcgacgcatgagtgtgaccgtgagctccccagctgatgagcgcaaaggcagagattggtttcgcgtgggattgtcccgatgtcaaggtcatgatgcaaaagcgttaagcatcctacggattatattgagaaaagaagtcattagtaatacaattggctttagaaaggattcattatgagcactaccactgttcgcatggatgatgatctcaaagccgaagtgaacgccattcttgattccatgggattgaatttcaatacgttcgtgaatatggccagcgtgcagttggtgtcgcagcgtcgtattccgttcgaggtgagggcgcctgaacccgtgctgcctcacgcgggacatgttgccgccaatggagttacgtaccgtggggtcgacgaacagggatatccggtggtcgaagtgccgaacgccatggtgttgaatccaagccggggcgccgatggtgttgccgtactgcccaaggcgtggcgcgatggcgaataatcatgatattccggaattgatgccggttccggagcaattgcatgtcttcgacgtgtatcgcatgcgggtgcggttcgaggatgatccgacgaaatcacgcaaccatacgtggccgccatcgtcatacaagccgacgacgacggtggagtggctgtggaactgaccggcaatccaacttggcatggggcgggcgatgtgcaactgcccgagtatgagcatgccgggcttacccatctgacgaccgctcgctgcgcgcagctggtgcggttccgccggtcggatctacagggattcgccggtagattgagtcggaatgatgccatacgtgtggccaatgcggtcggcgaggtaaagcctgaagaacaggtgtggctgtaattctgttctgccgtctaactggttcggggtgttcactgtgaaccagtgcgcaattgcgatggtcggatgtctttctacagtccgcttatatgtgaaggttttgtggtcgacgttgcgtcatatgttgcttgtgacgttgcgtaatgcggcatattgcttggtgaaaggaggttgggccatgtcgatggacgatgaaacggacagccgatacaccacaggggacatcgccaaactcactggtgtgagtgtgcgaaccgtgcagtactacgacgccaaaggtctgttgattcccaatgagatcagcgacggcggccgaaggctgtacgggactgcagaggtcgagcggatgcgggtcatcctttttctcaaaggactcggcttcaagctggagcagattcgctcgattctgtcggacgagcggccggaacgggtgctggttgatttgctggatcagcagacggcatccttgcagtcgggtatcgccgagcagaagcaacgtcttgatgactgcttgcagctgcgcaaagcactgacggtctcggcgtctgacttcgtatcgtcaacattaaccgacatggcaaccgttatgaacaccacaaccactcattccctgcgcaccacatatttggtcatactggcaatcgcattgcccgcgactttgttgcaaattgcatgcctcgtcatcggtgtgatgacagacgtatggtggccgctgccggtcgccgttctgctggcgattgcgctcactgttgcggcgatgaagtactatcgctcccgcgtgcagtacctatgtccggcttgccatgagaccttccagccgggtatgcgagagttcgtattcgccgcacacacgcccaagacacgcaagcttacctgcccgcattgcggtcacagggggtactgcatggaactcagcatctgaaagtttctgattatagcgttcgatttacgaacggtagttgtcgcagaatttgcgacaactaccgccctgccaaaatatgtgcgttgtgcagggctaaattgtttcaggtcgcggctcgggcggtaggatctgccgtttcatcgctgcttcggcgttcctgttgctgattgatgggtgacattacgcttgtgttggatccttctgcaggagcaggaagatgagcgccaacaccagcaggatggcgatggaaagcacgccgagggaggcgttgccggtgatcgacgtggtggtggccacgaggaacgtgcccaggatgctcgcggtcttgccgaaaatgtcgtagaagccgtagtactcgttggcgtggtccttggggatgatcttgccgtaatacgagcggctcagcgcttggatgccgccctggaacatgccgacgaggatcgccaggatccagaactgcgcggccgacacgaggaagaacgcggcgaagaacacgatgcacatgtaggccacgaccgccgccacgatcatcgccttgcagccgaaccgcccggccatccgcccgtacaggatcgcgcatgggaacgccacgaactgcgtgaccagcagcgccaccaccagctgagtcgagtcgatgcccagctcggcgccgtacgaggtgctcatcgagatcaccgtgttcaccgcatcgatgtagaagaagaacgcgagcatgaacatccacagcggcttgttcctcattatcttgcggaaggtgccgccaagctcgcggaaggtgccgcgcacggccgttcccagctggtcgcgtgtggcgcggtaatgctcctgacggtagctggagatcagcgggatcgtgaacgcgacccaccagacggcggtgatgatgaacgatgcgcgggtgcagccggtcgtcgtccagccgaatggcagcgccgggccgccgaaaatcaacgcgatgcacacgatgaacggcacggtcgagccgatgtagccccagccgtagccgtgcgaggagaccttgtccatgcgttcgttcggcgtggtgtcgatcagcatcgaatcgtagaacgtgagcgagccgttgagtccgatcgtcgcgaggatatacacgaccaggaacggcagccacgtcagtggaagcgccatcgcgcagcacgtgacgacgccggtgccgaagaagccgaggaagaacttgattttcatgccctgcacgtcggcaatcgagccgagcagcggcatgagcagcgcgatgaccagcgatgcgatggtctgcgcgtagccccaggccgacacgatgttgccgtccgcgggcatcagcgatttcgcgtagatcggaatcaccgcggtggacagcagcacgaacgcggagttgcccacgtcgtagatgatccatttcttctcgcgcggggtgagtttcgcggtggcggtgagggccggatctgtgccggccgctgtactgtctgccgggccatcggtgggtttggctgcgatgctgtcgttcatggggactcctgacgtcgtgttcatatatatcgtaaagtgccgtttccggcataccaagtttccatatgaattgcgggtgaattgttgcgggccggcgggagtcggacgggttgggcgggtcaggcgcgcaatgggccgcgtcgatcgtggcgatcgtcatcggggtcggcgttcgttatctggtacacctattatgcgtggcgcaagcccgatcccatcgaagaggcgcggcgggcggatatgttcgctcgcggttggacgccgctggacgaggacgtgcacttccctccggcgtggttcgccaagatttccaagctgaggacggtcggtagcgaaatgccgcatacgacatggggcaaggacggctggatcacgttcaactatgacgtgatgcagttcatatcggacgcgaaccccagctatggcaccgatatcgtgttcctggtatgcccgtgcacggtgccacgaggcccactcatgtgggcgaccatctatcagggtcgcaagatgtttcagcgcaccagcgagcagggcggcatgcccgccgacgtggtcgaactgctgaagatgagcccgtacagaccgaatctgatcgtgatggatggacgaatctacatatggttgcgggtgaattacatgccgttgccgcagcgtttttctgaattatccgctggaaagcgatctgattccgttgacgaaggaactgcatcgcaggctcgcccgcgatatggggattgtcggccagacgccgtggggtggccgcgcctgagcggtcatcggcacggtgattggtccaatagcgtccttaagtgcgcgccgaaacgacaagtgcgcgcacatagggacgcaaaacacccgatttgcgtccctatgtgcgcagagtcgtccgttcggcgcgcacttaaggacgcaaacggaacgacagcgttgcgcaacaatccatatcggccgggcgacgctgcgaggaatggctacttcgcggcctcggccggagtctcgtcttcctcgagcttggcgatgacctcgtcatagccggggcagtccggaacgccgttgatggaacgctgaatgcccagcgaagcggccgcgttggcgatcttcaccgcatcgacaagcgaccagccgcgggcgatcagtgcgcacatggcaccggtgtggcacgagcccgccgaacgggtgtgcgtcgccttcgtcggatacccctccacatggatgacttcgccgcccggcgtgcgcacccacgcgccgcgcgaccccgcacgaaccaccagcggcgcgcgcagcgtggcgccgaggctgttgcacagcgccttcatcgagtcgtcgaatccgccgccgacggtcatcgacagggaatcgtccacgaacacgccaagccggtcggcgagcgtgcgggcctcctgacggttgcaggaccagatgggccgcaccagcaccagatcctccagcaggtggtcgctgaccatgtgcagcgtgttggtcggattgagcacgatgctgtagtcgcgcgtcgtcgggtccgaagaggtgcgatgcaggaaggcgtcgatgcctgacgcgctgtgatccatcagcgtgttggcgctgatgtgcaccacatcgccctcgccgggctccacgcagtcgaacgtgttctcgttgccttgtgattcggcgccatacgtggcgacgaacgtcttgcgctcgctgtcgttgagcaccagacggaaaccggaatcggcgtcgatgcggtcctggccgatgtgctcgatgccgttgtcgttgagagccttgcggatcagtgacgcccacggcccgttgccgatgacgcctgcgtgcttggtcgccgccccaatccggctggccgcctgcatgacgcggaagctgccgcccaccgacggcatggtatggttcgcgacggcgaatccgcccggttggggaatcgcgtcgatgtccatcatgatgtcgacccacacctgtcccaacgagatcactgtgggggagggcacgtcgtttttgcgtgaaagcaggcctttaagtgaattgagcatcattcctccttgacgattgccgcgttgcatgtatcgtatgccatacagtaaccgttttaccgtgattttatgaagagttgctggatgcggcaatagtcaagacgggtgatattgtgtggatgtgtaggtgaaagccgcaatgatacacgcttgatttgcatttgtttgtgtttggcgctattattgtgaagttgtgtgttcaagcatccgtgctggaacacggaagacttgaacatcaaggttattaagggagtccatcatggcagctcgttgtgcagtgtgcggcaagggtccgcaggtcggatacaccgtttctcactcgcatatccgcaacaagcgcaccttccgcccgaacctgcagccggttcgtaccaccgttgacggccagaacgttcgcgtccgcgtgtgcgtcaagtgcctcaaggccggcaaggttcagcgtgtggttgcgtgacatcgcgcgataacgtttcactgaggccccggaagtcgcaagactccggggcctctttatatccgctggcggaggggacaatgcgatgccgtcccgccggcacaccacaatagggacgtatgagcatcacgttgaacaccaccatgtcgtcgatcatgacgaacaagcggcgtgtcggcgcgctcaaaagccttggcgtcgtgacggtgggcgatgcgttgacctactatccgttccgcgtcgccgatccggtgcccctgcgggcactgcgcgaggcccgtatcggcgagagaatggcgttctccgcgtcggtgcgcggcatgcgggtcgtgccgatgaacgttcggcggggctaccggctcgaggccgtggtggatgacggggatttcgcggtttcccggcatatcgcgggggccgccgcccgtttggtgttcttctcgtacaagaagcagtatgtcgattggctgagcatgcggctgcgttccggcgcgattgtggtgatcgccggcgagccgagcgagttcaacggccaactgcagttcacccatcccgaaataatgacggtcgctcccggctccggtccggctgatggcgaatactccggtgtcgtgcagatgagcgctctgaaatacgacgccgacaccgtcgaagcgggcctgcgtcgcatcagcagaccccgaccggtgtatcacgcgtcgtctcgtatctccagcgaacacattcatgagtcgatagtgcaatgcatcgagttgctggccggaaccgggcaggatctcccgggcgatgcggcaacggaagccccgcaaacaatgaaaccgatggaagacggcggcatcagcggcgccggaaccgctccagcggatgccgagtctcggtcaggaaacgccgtggccgtcggcctggcccgcgcgatcccggacgtcctgcccgaatcggtgcgcgaatcgaatcatctgctgcatcgcgcggaagcgttcctggccatccacgacccgctcaacaccgcggatttcaaacgggccatcggcacgatgcgctacgaggaggcgttcgtctcgcagacggcgctgctccagtcgcgtagcaatgtccgcaaggatgcggccctgccttgtgcgggcgtggcgctgcgtgaccggttcatcgaatcactgccgttcccgctgaccggcggccagcgggagatcatcgatgatatcggcgtggacatggcccgcgaatatccgatgcagcgcctgctgcagggcgaggttggttccggcaagaccgtggtcgcggtcgcggccatgctgcaggcggcgggttccggccatcaggcggtgcttgtcgcgcccactcaggtgctcgccgagcagcatcatgcgaccatcagcgccatgctctgcgcgattgacagcgtcgagacgggcgatgacccgtcccgcgatgccctgtctcccaatgacccggccgacctgatcaaggccgccgaatccgctgccgatgacggagatgccaaggggcgcgcggccgtgaaacatcccgtgaaacacagtggggcacgcagtgggaaacaagacggcgcggcgcacgcgcagtcggacgcgaacacgcggcacgtgccggtcatcctgctgaccggcggcatgaaactggccgcccgccgccgtgctctcgcgctcgcggccagcggcgacccgtgcatcatcgtcgccacgcacgccgcgttctccaagacgttccaggccccgaacctcgcgctcgtcgtcatcgacgagcaacaccggttcggcgtggagcagcgcgaatccctgcgcaccaaaaacgatgtcgtgccgcacctgctggtcatgaccgcgacgccgatcccgcgtacggcggcgatgacctggttcggcgatctggacatctcgtggctcaccgagctgccgggcgggcgcaagcccatccgcacgttcatcgtgcctgaagacgacggccgcatgatgggctccatgttcgcccacatccgcggccgcatcgacgcgggggagcgggcgtatgtcgtctgcccgcgtatcgatgccgacgatgaatcggacggcgatgacgatacaagtggggcatcgcagatcggcgtgtacgacgattccgacacctacaggcgcgaatccgccaacacaaccaccagcgcgccatcgcaggaggatggtgacggtgctccgtcacggccgccgctgcattccgtggccgagatcgagcgcaggctgtcatcgctgccgcagttccgtggcatccgtttcgcgacgctgaccggccgcgacgatgacgcgaccaagcagcaggtcatggccgatttcgcggatggggccacgccggttctggtggcgacaacggtcatcgaagtgggcgtggacgtgccgcaggccagctgcatcgtgatcttcgacgctgaccggtacgggctttcgcagctgcaccagctgcgcgggcgcgtggggcgcggcggcacggattcatgggcgttcctgatttcgcgggctgaggacggcggtcccgcgcagcagcgactgcaggtcatccagggcacgctcgacggcgcccagatcgcgcaggccgatctggagttccgcggcgccggagacgtgctcggcgatgcgcagtcgggcggcaagtccggtctgaaactgctgcgcgtggtcaaggacgccaagatcatcgccgacgcgcgcgaacgtgcggggcggttgctcgccgatgaccccgatctgtcgggcgaggtcgagcttgccggcgcggtgcttgatttcacccgcggcaacgagacgttcctgaccagcagctgacgcgcgacgggcgatatgcgccgcggatagggtcgttggacacgagccccggccccgccatccgcgatcgaacaatgtggcgcttgaacacagtatagatttttcatatgggaacggcgttctcatcgccggcatgatgtggttcagttgtcatgaaggtttcggccggggaggggcatcatggcatcatcacgttcactgcacacggttcatctggccgctttcggcgcgggcaatgtcgtcggtctgggggtcatgtcgatggccggcatcggcgtcggcatcacgggcaccggattgtggctcgccgcgctggtcggtggcctgggaggcgcgttcgcgctggtgccgcagctgctagccagctcgtccggcgattacccgggcggccagtaccagcaggtcggcacgctgctgccgcccgtcttcggcggcatcgtcgcctatatcctgtgttttctcgtgttcgacatctccgcgtacgcgctgtccgcggcgcagctgctcggcctgcccatgctgccgacacgcctgaccgcggcgttggtcgtcgcgctgttcctcggcgtgcacatgctgggtgcccgcatcgccgccatcgcccaactggtgatggccgtgctgctcgcggcggcgttgggcacgtacgttgcggtgacaatgccgcacgtgcggctcgcgaatctcgcgcattacacgtttctcggctcgcctctggcgttcctgttcgcatgcgtgtacatgacgttcatgatgaacggggtggccggcgtggcgaactatgccgcggtcgcggaccgtccgcgggtgacggtgccccgcgcgatgcgcgtctcgctgttgctggtcgccgtgacgtatgcgctgatctgcgtggccgatgccggcgccttgccgatagcccaggtcgcgaaccgggatctcgccgtcagcctgtccgcattcgtcccggctccggtgacggtcgcgttcgtggtgggcggctccgcgttcgccctgctcaccacgctcaatgccgcggtcggctgcgtggcgtatccggtcgcctcggcctgcgcggacggatggttgccgcgcgaactgggagagcgttccgctcggaccggcgctcccgtgcgcctgctttcggtgggcatgatcgccgcggagtgcccgctgatcgccgggaattccgcgaaaaccgtgtcgtcgagcgtcacgattctgatgatcgtggtgcaggcgatggtcgccgtcgccgcattgcgcctgatattgcgcgacggctcatcgctctgcgcattccgctcgctgccgttgctcggccgcgtgccgcaatccgggctcgcggcgttgtgcatcgtcgcgctgctcgtcgacctgctgctgatcgcatggctgctgtacacgatgaaccgtctgctgatcatcggcaatgtcgtgatattcgccataacggttgtcgccgctgtcatcgtgaacaaatatagggttgatacgaggccataacaactatgtataaccgcgggtttgccaacgcggcgacgcggagcctacgatgatgtcaacgttcacgggaacccgcgaacaggcccggccccggatgatggggcggcaccccggtcaggtgtcttatccgagcaaggagtacgttatgtgtgtcaatgaaggcgtgaaggcatcggctgtcagctcactgtcgggcggactgccgatcatgcgcgagcggtgagagaccgctcgatagtccgtttcggatgtttgccggcgcgatcgcgatgattgtgattcgccgtccggcatgattcctcacactcccggcagattacgccgacggttgccggatcattcgcggcgatgcggattctgccgcatcgcaggttttcgtatatcgcgattcgccgccaccaaactgtaccgccgcgccgtatccaaaaacggcgcggaagacaagaagaagggaatatccatgtccacatcatcagctcgtcatgaagcgccacgcaacgggcggcccgtgaagcgccggcttatccgcgtgctcgccggctcggccgtgataggcgctatggcggtcggcggcctgcaattcgcgctcggcacggcctacgcggccggcgacgtgtgcgacctgtgctcgaccaactacaatccggtcgcctgctgttccagtggcggttcggcttacgattccaaccccggaggcggcatcgacgtctcagcgcagaaggccgcgttcgacagctactgcgcgaactacaagaaggagcacgcccagaaggaggagccggcgacgcccgcccccgccacgaagccgagcaacccgaagcaatcggccccggccccggcgaagcagtcctcgggctcgccggccacccagacgacgaagccctccacgggcaacaccaccgcgcaacagtcgcagcccgcgcagtcgaccggcacacagtccggccagagcacgacgggcagcacagccgggatcacaggcgacacggccgcgaacgccgatgccaccgccactcagacctcgaaggacgcggcctcccggaagaacagcgatgacaacaccgccgacaccgctggcggcgagaccaccacgaccgaatccggcatcaccgacagcggcactgatacggcggaaaccaccacgcaggcctctccggtcaccgatcgggccgaaaccaccagcccggtggtgcgcatcgtcgccggcgtggtcatcgcgctcgccgtcatcggcacgctgggcgccgcgctgattgtgcgcaacaagcgccgcgctcccgcgctcgccggagcgaacggcggccggtccgacgacggattcgacatcgcagacggcgcgacgccggcccccgcgacgacggcgaacgccattgccgcaaccgaagcccgtgccgacgcgagtgcgccgaccgaagtgctgcagcccatcgcatcgccggcgaacggaccatccgccgggccatcggcgagtctcaacgtggccgacagcggcggcgctcctaccgcacggtatgacttcaacctcgtcgacggaccatcgtcccgctgagccatcggcgcagcagtaccaacgcaattcgatacggaagaaatacagaagggaaccacaacaatgtccaacaccaaccacagcctcacgagaggctccatcgccgctaaagccgcggcgctgctcaccgcggcggcgctcggtctcaccggattcgcgctgacgggcgggaacgccgcgtccgccgccgaaaccacgcccacggcggcaacagccgcacaatcccaggaagacacgccattcgactactacgcgggcatccccgacctgccttcggatcacgtgttcgaaaacatcacgctggaacgtctcgaagacatcctgcgctacggcaaaggcaacttcgtgatactcatcggcggcacgtgggactccgcgacgacggccgcactgcccgccatcaacaccgccgccaaggcgcagggcatcgagaagatctacaatttcgacccgcacctcgacaacgccggagccgacacgctcgtcaacatcaacgacaagaacaacgcggtcgacgcattcgccaagcggttccagcagaccatcgacgaattcggcctgaccgatctgcaaagcaagaacacagcaaacgtcgtcgatctgccgaccctgttcacctacaacaaggacaacaccggcgacaaggtgctcgcatccaccgcgaacgttgccgacagcgccgagctgacccgcgtgctgggcaccgcgaagaacgccgcgacccgcgccaacggccagttctacaccaactactacctgaacaacgtctcggccggcgcggccagcgtgttcaagcagggcgaggacaaggacttctcgctcatatcggtgacgtacggcgaactggagaagctgctgcagtcgccaggcaaccattacatcttcttcggcgcgacctggtgcggcaacacatacgccacgatccgctacgtgaaccaggaagcccgcaaatacggcatcaagcacgtgtacacgttcgacacgatcctcgacagcacgtccggcaaaggctcgccgttccacatccgtgacaactacaacaacggcagccacccgctgtcggacctgtacacgcatctcgtgaacacgtacctgccgaacctcgtgaccgaggacggcagccacggcgtcgtcgattccaagggcgtcggcgcgacccgcctgcaggtgccgctgctgctgcactacaacaagaacaacgccgcacagctgcccggaaccgaccagccggccggccccgtgaccgatgaggtcgtggactaccatggcaagaccgcgaacgtcgacgccaagccgcagcccacggcgagggaatacatgctcaactggtacggcaccacgtacgacgacagggcgatcatccaaggcggattctccatcaccggcgacgacctgagcgcggcgaagaactatgggcgcaaggtcaacaacgaccgtgacgcatacatcgcccaggccgaccacttctactccctgctcaacctgcgcggcgaaatcgcacaagccaagacggtgagcctggacggttactccgccgaccgggtcgccgcattcaagaagacgctcgccgcggccgaaaagaccgtgtccgacaagaaggcgaccatcagcgcgaccgacaccgccacgaagaacatcgccaatgcggtcacggcgctcgccggaggcaacaacggcggcagcggtaacggtaacggcagcggtagcggcgacacgggtaacaatccggtcgcaggcaacaccgacaacgctggcggcaacgatagcacggccggcaacaagccgtcccgcaaaatcgtcgtcgccggcaacgagccgctctcccgcaccggtgccgaagccacggtcatcgcatccgtcgcgctcagcctcgcgctgaccgccgccggggcgctggcgctgagccgcaaccgtggcgacgccgcggcggcacaggctctctccgactcgacccgcccgacctcggcgaggtgagctgactgatgggagcgctatccaacatcgatcccaccgcagtggcggtctgggcgtcggccgtggtgctgttcgccctgatcgccgtgctgcgcgcggtcttcaaactcaacttcagcctgctgacggtgctcgcgcttgggctgggcatcgccctgagcctcgtgttcgacgggcaggtcgactcgctcaacctgctgggcaacatctacatcaacctgatcaccgcgctggtcgcgccgctgatcttcgtgtcgatcatctccagcatcacctacgtcggcagtctgaaaaagctgcgcagcatcggattgcggtcggtcggctggctgctgctcaccaatctgatcgccatcgtgatgacgctgggtgtggccatcccgctgcacatcggctcgggcgtcaaactcgtcgacgacgagtcgaccgccggtttcctcacctcgcagacagcgccgctcgaccaggtcatactcaacttcttcccgaagaacatcgtcggagacctgtccggcaaccgtgtggtgcccatcatcatcacggccaccgtgctggccatcgccatcgtgtcggtcggtcggcagaaggacgtgagcgtcgtcaagcggttcttcgagcagaccaagggcgtgatctacaaggccgtcggctacgtggtcgagctcaccccgtacgcggtggtggtgctgggagcgacctcgacggccgcgaccacatccaaggcggacgcgctgctcgcgctgctgagcattctcgtgctgggcttcgtgctcaacatcatccaggcgttcgtcgtcaacgggctgctgctgaaattcgtggcgcacgtgccgcccttgacgttcttcaaggccgtgctgccggcgcaggccacggcgttcgccacgcagtccagcgtggcgacgctgccgctgagcatacggcagctcggcacggtcggtgtcggcgcggacgtggcgaacttcaccaccccgatcgggacgaccatcggcatgccgggatgcgctggtgtgtggccgatgctgtcggccgtgttcaccatcaacgcgctcggactggggtattcgccggtgagctatgtggcgctcgcggtgatcggactgctgtcgtcgatcggtaccgcgggcgtgccgggcactgcgatcgtgaccgcgacgaccgtgttcaccgcggttggtcttccggtgcagcttctggtgccgctggtgccggtcagcaacatcgtcggcatgccgagcacgatggcgaacgtgtccgctgcggtcacatgcgcggcgatcgtatcgcggcagaccggggagttcgacgagagcgtgctggattcggctcgtgccgggcggcatcgccatcgcgcgggcgtggtcgtgtcgccggctggcggggcggttgcggctcctgtcgttcctgttgcggctcccctcggcgcggtgggtgttgcggcgtccgtcgtcgcctcgcccgtcgcggctggagtcggtgcggcccataagccggtgcagccgggattcgcggtgacgcctggattgtcattgacgttgcatcagtcgatgctgcgtgtgcaggccgacgacgatgccgacgacgctccggtgcccgttggcgcgtgcggcatctccgcccacgctgccacggcaaaagccgcataggctggcgagtgggctggctggggccgcctccagtctcgctacgctcgacagcccccgctggcgggggggggctgtcgagcgtagcgactgggggtggtcgaagatatgtccagatgaaaaagcgacccgcaaacggtcaaattacgcgggtcgcagtgagtatccgagcaagggtacccgcaaagcatcatagcatatgaggcatgtgagcaagctgagtcgcgtatcggagccgtctgatatatggcacgtacgacccaggaccggtggtgcggttgcggtcgtttcgccggtgcggccataatggtgtcatgcatgtgatttcaggacgattcaagggcgtcgcgttgaccacgccgaaaaccggaacccggccgaccaccgaccggaccaaagaggcgatattctcgcatctggattcatggcaggtgctggacgacgcccgcgtattggatctgttcgccgggaccggggcgctgggcgtcgaggcgttgagccgcggcgcgagggagctggtggcggtagagtcctccgctccggcggcggcgctgatcgccaagacgttgaccgcgctgcagcggaaccgttcgtgggagcgcggcatgacggcccgggtcatcagggccagagccgagaagtacgtcgcttcgagtgccgcacgctcggcctcgaacgccgatgctgctggcggctccgcgaagtcggcggcgttcgatgtgatcttcatcgacccgccgtacgcgttcgccaccgaggactgcaaccagttgctctcggacatggtcgcccatggaatcgccggcgggaatacgacgatcgtgttggagcgatccgcgcgttccgacgagcccgtgccgcccgagggatgggtcctcgccgagcatcgcgattatggcgagaccgcggtgtggtatatcgagtccgcgcttgagacgtcggaggcctcggagacctcgggcgcgacggatgagtgagcggccgaggcgagtgtagcccgttgctgcgagcccgaagcggccttggcccaatcgccgccgtgccgaatgttacctagctaatattctctgacagagaacatcggcatgtgggtcgcatggcgcacgtatcgttaatcatggaatgcctcgaatcgaggtatcgaatcgagctattagaagacagtgaaacaacaaaacgcaatgccatcgcgaaaggatgccatcatgtcgaacttcatcgaggaactcaaggcccgtcgctcgcagtacgtgctgacctccgaatccccggtcggcgatcaggagatcgtcaagaccgtcgaggatgtcaccgtgcaggtgccgagcgcgttcaactcccagccgcagcgcgccgtcgtgctgttcggtgacgccaaccagaagctgtggaacatcgtcaaggagacgctgcgcaaggtcgtgagcgatgacgaagcgttcaaggccaccgaggccaagatcaacgccttcgccgccggccacggcaccgtgctgttctacgacgacaccgacgtgaccaagcagctgcagaagaacttcccgacctacgctgcgaacttccccggattcgcccgtgatgccgccggcatgctgcagctcgccgtgtggaccgcgctcgccgagaaggggcttggcgcatccctgcagcactacaacccgctgatcgacgaggcggtcgccgccgaattcggtctgccgtccagctgggtgctgcaggcgcagatgccgttcggcaccgtcgcccaggccgcggctccggttgacaagcagccggttgactcccgcgtgaaggtgttcggcctgtaagccgaatggtcgctcccgctgccggggtggggcgaaataccaacgagccaataaaaaacccgtgaccggttgcatgttccgcatgccggtcacgggatttttgcttgactgttgtttccgccgccgacctgtacggccggccatcaggcatcagccctcaatggcgatctggtgcttgctttcgacctgcggctgcgcctcgatcttcggaacctgaatgcgcagcgtgccgttctggtagttggcgtggatgtcgttctccttcacctgatcgccgacgtagaagctgcgcgagcaggtgccgacgtaacgttcacgacgaagccacttgccggactcatccttgtcgccgctgtcctcgtccttatgggcggacacggtcagatagccgttgttcagcgagacgctgatgtcgtccttcttgaagccgggcatgtcgatgtccacgtcatagcccttgtcgttctcgcgcacgtccgtactcatcatgttcgtcggggtcatcgccgcgctgttgtcggcggaacgccaaccctcgaagaacgggtcgtcaaacaggtcagagaacatcgtgtcattcatcaaagccggaaacattgccataatcggtactcctcgcatatcggagtggaacgggttggcttgccgcgccggccgggtgactggccttgccggtgtggtctatcgtggccgttcccggaacccctctcggagctcctcctcttgccttgcgccactacctaccggtattccgtcttgacattcccggattttacccacagtgaaaaagttgagtgtgtgagactcaacttttgcggggatagtggctgatgacgtgtgccaagcgacttactgcagcttgcgcggacgagctccggagacctcccagccaagggcgatgagggtcttgcggtcctgcttgtcgagctgccggcaatcgagctgctcgatgagatccgggcgaatgtcgttggtgcgggtcaacgcttcgtcgcggcggaaccggtcgaccttgccgtgatcgccgctggtaaggatcggcggaaccgcgatgcctcgccacgtggccggcttggtgtactgatggtgttccagcagtgcgttgccgcccgtgtacgactcctcgacgatcgaatcgggattgcccatgaagcccggcagcagtctggtgatcgcctccagcatcacggaaaccgccacctcgccgccgttcagcacgtagtcgccgatcgagtattcgcgtacgtcgacgccctgcgcgcggtaatactcagggattcgcgcgtcatagccctcgtatcggccgcagccgaacagcagatggtcggcgtgcgagagctcggtcgcgtcgcgctgcgtgaacagcggcgccgagggattcgggaagatgagaaccggcgcggcgttcccgccagcttcactggtgtcgctcgtggtatcggaaacgatggaagtgacggaagcggctgcgtcggtcggattacctgcatggcccgagtcggccgcatcggtcgtatcggctgcttccgccgagttgactgcgccggacggactgacggaggccgaatcatcgtcgtgcgcgtcggaagataccgcgtccggcgcgatgactgcgggtgccagaccgagcaggtcatccaggcattccgcccaaacctcaggtttcatcaccatgccggcaccgccgccggccggcgtatcgtcaacggaatgatgcacgtcatgcgtccagtcgcgcaggttgtgcgcggtgacggtgacgagacccttctcctgcgccttgccgaacaggctcaggttcagcacgtcaaaatactccggaaacacggacacgatatcgatcttcatgttctccagcgtagcgaatcccgcagtccgacggcatgagcgtcgcgacacgcctggatgtgtggcatggttcgtcggcgccggctgactggaatcgcatgattccgatgtcttttataaatcgcgtctgtcagccttgctacgcatccgggcgtgccgcattgttgccggactcggctcggcgcccggcaacaacgccgtcatgtatgacagtgtccgacagccgcagctgtcggacactgaagggtgaccggggccgaatcacagtcccggaatcagcccgccgggcgggtcgatcgtcagatacccctcttcgaggtcgatgtcgggcaccaactcgtcgacgaacggcaccagtgcggtcgattccgtcacttcgccggtgacggtgtcccgaaccggcgagaccaggcgaatcttcaacagcgtctgcgcgctgtcgagtacgtccacgaccttgcctatgacctggccggccggcaggccgagcccgttgccctcggcgagccgcgcttcaagcccgaccagatccttcggataccaggcgtcctcttccagcatgtcctcgggatcgtcagcctcgccgtacagctcgatgccattcgccgcctcggaggcgtcgcggtcatcaatgccctcgaacttaacgatccaacggttcttgaatgtgcgcgcgtactcgacgacgtattcctgcgaaccgtcgcgcgtgtacagcacggagtcgggagcgaaccgatattccggctcgtccgtgaagatctgcacggtgacctcgcctttgagcccctgcgcgcgtccgatacgacagaccctcagcaactcgcgctgctgagggtcgtcagagtgttgttgacgctccacgctagggttcacctgcgcacatccatgatgtcgacgcgcactttgtggtcggcaagtgcctgcaccacggtgcggatcgcattggcggtgcggccgctgcggccgatcacgcggccaatatcctccgggttcacgcgcacgcgaatgagttcgccgcgcgcgttctcgtgggacttgaccgaaacgtcatcgggaaaatcgacgatgttcttgatgaggtgttccacagcctgcgcgagcatgatcactcagcctgcgcttcctcggcgggagcttcagcttcagcggcagcttcggcttcggccttggccttggcgtcagcggcggacttcgcggccttcagcttctgggcttcggcttccacggcttcgacgcgagctgcggcgtccgggccggcttccacggtcttcagcgtgccttcggcgccgtcgaggcccttgaacttctgccagtcgccggtgatcttcagcagcttgagcacaggctcggacggctgagcaccgacaccgagccagtactgtgcgcgctcggagtcgatctggatggtcgaaggctgggtgttcgggttgtaggtgccgatctcctcgatggactggccgtcacgcttgttgcgggaatcggtgatgaccacgcggtagaaggcgtagaacttcttgcccatgcgcttcagacgaatcttggttgccaaaatggctctccttgtaatactaggtttgcggattttcgattgtgtgtggggcacctcaaccgagaacccacgtgttcctcatgaaaggcagaatgagagggctccacccatcacgaataaccgataaattataacgcataggggtggatacccgacacgctggagctggcaagcgatcgtcggggtcgacgtggcaaaaaacatcggcgcgcaaggtgcctgacgtgatgcttgaaagcctggtcggcattcactggcggaggattcggggctatctgcatttcgaggggttgattcgtgttgttccgaatgcctatctgcgtttcgaggggttggtcacaaagtataagtggcccaagaaccgcatgattccggtggtatttcgccgatcatacttcggatatcgcgttttggcgcccccttgaaacgcagatagatgtccggcggagccgaaatcaaccccttgaaaacgagatacggccacatggggtaccttggccggtcgcagcgggcggtttcgagacggataacggcgggtttgcttggacgttgtccagcccgaagccgccatcgaggcctataccaaagaggccagggtttcggcggcggccgcgaactcctccggcgtggtgtaggagtagctcaggcgcagcgagttgtccccctcgaaatcgtagatgtcgccggggttgagcagtacgccgtgctcgattgcgcgctggaacaggcgccctgtgcgcaccggctcgtcgaacgtgagccagacgtaaaaaccgccgcgcggcacgttccagtgggcacggccggcgaacagtcgctccagcgtctccagtgcggcgtcccgccgccggcgtagctgcatgcgcagcgagaccatgtactcgtcatacaggccgctggacaggaaccgcgcgaacacccactggctcagcgtgctcgccccgtagtccatctgcatcttcacgtcggccaaccgttgcacgatgcgctcgtccgccacgatccagccgatgcgcagtcccggcgccagtgccttcgacgcactgcccagcgtaatcaccatgccggtctcatcgaacgatttgagcgtgtgcggcgtatccccgtcgaagatgaggtcctggtatgcgcagtcctcgatgatcggcaaccggttcgccacgcatgaggcgatgagcgcccgacggcgtggctcgctcatcgtgacgcccgtgggattgtggttggtggggattgtatacagcaccgcgtcgttctcgcgcgtggccttggcccgcggcggcagtgaggtctgcggggcggacggtaccgccgccgtcatcccctcggactgcgacccgccgcccatcagcctccccagcgcatccacgtcaaggccatgctcgtccatcggtacgccggcgagtttcatgccggccgattggaacacctgcagcgacttgatgtagctcggcgcctccgcatagaccgtggatccggccgacagcagactcaccgaaatcatctgcaacgcctgcaatgcgccggatgatacaaggacctgcccgggcgtgcagctgatgccccacgcctccatgtgcgccgctatcgcctcgcgcagcacgtcaaggccctccggcggcggatacccgagcgagcttatctcggccgcggcttcgccggccacgcgccgccacatgtcacgggggaacagccgcgggtcgagctcgccggtgccgagacgggttttcgaccggtcgaattcgagtcggtttatcgtctgaatggtgtcgttgttcgccttgaagaacccggacgacacgtaatccgcccagtccggcgcgcccggcaacatcagcgaccacgtgttgctggcgatgcgcgtgccggcgccgtgccggccttcgacgatgccgtagtcggcgagctctccgatcgcggcgatgatggtggaccggttcacgccgaagcgttcggccagtacccgctggctgggcagtcttgatccgatcggccagtcgccgcttgagatgcgggcgcacatgaaaccgacgatctgttcggttatgggctcgccgctgctgcggttcggctcccagttgatgtccaatggtgtgctgcgtgtcatgatgcctgatttttggttgggtgcattgctctgttcttggctggttgtcaagtgtaatcgaatctgtagaatatggcaaaggtgttggaataaggcggatcttgtataacttgcaatccgcgtgaggaaatccagctgatggcatattggctggttttggttgggtggtgatgacccaaccaaatgattgtcgggagtgatgatgggtctgtatttccagggcttgacgatgggattggcgtatgtcgcgccaatcggcatgcagaatctgttcgtgatcaattccgcgttgacgcgtacgcgtcgcaacgcgttgattactgcggtgatcgtgattttcttcgatatcgtgctgtcgctggcgtgctttttcggcatcggcgcgttgatgcaggcgcatccgtggctgcagaccgtggtgcttggcctgggcggcgccgtcgtggtgcgcatcggtctgggactgctgctgccgaagaagaagtcgacttccgagaacggcgctggggctggtgcggttgctgctgcgactgcttcgacggcgagtccggtcgctggtgctgaagcccctgccaagcgtctcggtctgcgtggactgttgaagaccgttggcaccgcgtgcgtggtcacgtggttcaacccgcaggccatcatcgacggcacattgatgctcggtgcgtttgcggctacgctgagcgcgcagcaggccaccccgttcatcacgggcgttgagaccgcttcagtgatgtggttcctcggcgtcacgctcgtcgtcaacgcgttcgcgcacaagttcaatccgaagatcatcggcgtgctcaaccgcgtgtgcggcggcatcatcgtcctgtacggcatcaagctgctcgtggatttcgcgatggcggtgctgtagtcgggcaatccaagccttgccgcatggacttctacgggagcccatgcggcattgttgttttgacgtgccgggggcgggccgtctcggccattctgcgttactgtgagcgggttgcgtcacgctgcgtgcgcccgcacagcgtgacgcaacccggaaatccagtgattgcaagggttttgtgggtgcgtcactgtgagtgtgcccgcgctcagtgacggtgggcgcgctcagtgacgcatatccgctatgctgtccgtgcggcatgccgctcaaatagtcattgtggcggtcagcgcgaggtggtcggtgtcttccacgacgaatgattcgacgccgctgaacgcgacggctcgtgccggctcggcggcggagcctgacgcggattctcgcgtcgcggccatgatgtggtcgagctcgatgcgcggccacggcacctgactggggaaggtattgacatgtccgcgagcctgtgccagtgcggcgtcgcggaatccggaccgcagcagctcgcggaagctggcatggtcgatatcggcgttgaggtcgcccatgagcaccgcgatatcgacgtcgggatatgcggaaccaccgccgcgtccggctttcgagccggtggcacgttcctcgcggccagtgcctgcgctgaccgacttgcgcggcatcggaaccagcgcgctcagggaccggatgccgtctgaccattcccgacagccgcgcatcggcgatttggtgtgcgcggatgcgaatgccacggaggtgccgtcatcggtttgcagcatgatgcccggcacgtcggccgcaggtatcgagacaatgccatgcgtgccgcgtttcggcttggtgcgcgaccagatgccgttgaagccgccgttgtcggtcttttcgcggggcataccgagctgccgataggggaggatcctgtgcaggccgccgcgctcaagacgcttgatgagatccgtactgagttcctgaagcgcgaggacatcgatgtgtcgttcccgcacggccgcgatgatggcgtcggcgctcgccttgccatagcggcagttcaacgtcatcagatgataggtgtcgccgctcgcctgcggcgggttcgcggtcggctcggcgtcggcggatcgcgcggtctggcgatggtcgtctgacgctgtttcatgggatgttccacgctggtggtgccatcgttcccgtggcatgttcgtccaatacggaacctgcatggcaagtatcgacacgatgccggcgacggcgacgccgcactgccaccacgagccgaccagaccggcccataccgcgatgaccaggtacggtatccacaaaaaacgaatcagcgcaatcatgtaaggcatcgtcggcatgtgcgcttcccgcccggctggcaggaaccgcaacgccgaccatagcatgcacgccgccagcagtatccacgacaacacgcccaccgccgaactccttacctaacattccaacgagtgaataatggctttcagtgtaccggcagccgttgcgaattcgcggcgagtggaaagctgcgaagatatggcaaatgatttggcgccgggcggggatggccgaaaacgtccatacccacccggcgccagagaaaaacgggccgaatcagccgagcagaccggaaaggccgccgccgaagttgggcggaagctcgccaccgttcgcgtcgagcgcatcctgcagcccggccggaagagccggattctgcggcttcttcatgaaggcggacccgccggacttgccggaaccggagcccttgccggcgagcttgtcgcgcaacgccttctcctcggcctcgcgcttcatcggattgccggacttcgagcccttcttcttgctcttgcccttgcccttcttgccgccgcctaccgcggggcctccgaaaccggggatgccgcccatggccttgttgctcatgcgcttcatcatcttcgcggcctgctcgaaccgttgcagcagcccgttgaccgccgagacggttacgccggaaccataggcgatgcgggcgcggcgagagccgtcgatgatcttcgggttgcgccgctcttcgggggtcatcgaccggatgatcgcttcggtgcggtcgatctccttctcgtcgaactgctccagttccttgcggtgctgcgccatgccggggatcatgccgagcagcgacttcatcgagccgagcttgcgcacctgctgcagctggtccatgaagtcgtcgagtccgaactcgccttccgccatcttctgggcggccttgcgggcctcctcctcgtcgaactgcttctgcgcctgttcgatcagggtgaggatatcgcccatgtcgaggatgcgcgaggccatgcgatcggggtggaagacctcgaagtccttgagcccttcgccggtcgaggcgaacaggatcggcttgccggtcacgctcgccaccgacagcgccgcaccgccgcgggcgtcgccgtcgagcttggacagcaccacgccggtgaaatccacgccctcgtcgaacgccttggccgtctggacggcgtcttggccgatcattgcgtcgatgacgaacaggatctcgttggggttcacggcatcgcggatgtcgcgggcctgctgcatcagcacttcgtcgacgcccagtcggccggcggtatcgatgatgaccgtgtcgtacagcttctgcttggccagcgcgatcgaatcgcgggccacctttaccgggtcgccggaggtctcgcccggcgcggacaccgagtcgcccccgtcggactggacgcccttctcgggcgcgtacaccggcacgccggcgtgttcaccgaccacctgcagctgggtcacggcgttcggacgctgcaagtcggcggcgaccagcagcggcgtgtggccggaatccttcagccagtagccgagtttgccggcgagcgtcgtcttgccggcgccctgcaggccggccagcatgatgatcgtcggcgggttcttggcgaagttcagcggccggtccacgccctggccgagcacatccgtcagctcctcgttgacgatcttgaccacctgctgcgccgggttgagcgcttcggacacttcggtgccgagcgcacgttcgcggatgcgcgcggtgaaggaacgcaccacgtcgagcgccacatcggcgtcgagcagcgcgcggcggatctcacggatcgtgccgtcgatatccgcctcggaaagtttgcccttgctcttcagatgcttgaacgcattcgagagccggtctgtcaaagaactaaaagcagccataatgcgaaccagtctagccgttgcggcggaaaaccagcgggctgccgccgaggcggcccgcacggcgacggagaggtgccgcggggcgccgttcggcggtcgcggctgcgcgtgggaccgacgcgagagagcggcggaaatgcgacagaaccgttggccttgtgggcggcggggattcccgcacgctcagcgcgaaccgacacgcccggaatcgttcgtttccgttaccatggaagggcaataatttccgtggattattggatcgctgagctgttttgattatccttcggacccaacctatacgcagactgccgctctgacgccgacgcagacatgccgtgcaatatggaaggcccgcctatgccacaccagaaaaccatcgaacgcaaagccctgatcgtgggcatcgtcatcaacatcctgcaggtgctcgcaggcatggccgtgttcttcatgaccggtctgaaggccatgttcctggacttctccttcaccgccatctctgtgctgtccggcctcgtcgccgcatacctgtcgtcgcgcaccgtgcgcaccaccgagcgcttccccaatggcatgttcgctctggaaccgatatacgccatctgcaaggcgatgctgacgatgtcgctgctgctcttctctctcgtcgatgtgacgcgcgtcgcctatgactatttcgtgcttgggcagggcgggcgcatcgagaccgggcccgtggtgatttacgagatcctgaccgtggccgtctgcctaggactgtacctgtattaccggcgcgagaaccggcgcatccgcaattccagcacgatgctgaccgcggagtgcaagagcacgctggtcgacggttcgatgtcgttcggcatcggtgtggtggccgtgttcctgtggttcctgccggctggtggccctctggatttcctgcattacaccggtgatttcttcatcaccgtcgcactggtgctgctcacgatcaaggagccgttcggcgtgctcaaggacgcgttcgtggaactggtcggcggagtgcatgacgacgatgcgacgaacgcgttcgtggagtcggcggcgcagcggcatctgccgcagaacaccgattacgagcaggtactggtgttcaagaccggcatgaactatacggtcgatgtgtatctgagcggtatcggtcagagcattgacattgaggatctggtggagtgcaagcgagacttggagaaggagctgaccaagcggctgcatatcgtggatgtcgatttcgtgttcgattaaggagcggaacaggatcggatgatcatgactgtcccgcgatgatgccggggcgttcctgcttggtatttgattgcatttgctggcataatgccagcgacaatgctgggctgctatcggcgctttcaccgtcaaaatatgctccgatcgcataaccgtaaccagttgagccccgcttttttgggggggggcggggctcaacataacggatcacacagtgtcggggaggattacttcaaactccacgtgctgccttgcgggccgtcctcgatggcgatgccggcggcacccagcgcgtcgcgaatcgcgtccgccttggcgaagtcgcgggacttgcgcgcttcggcgcgggcgttcagctgctccgtgatcagggcgtccagcacatcatgctcgcggctctcgccgttgccgtccgcgcctgcggcaccggcccacggctcggccagcggatccagtcccagcgcatccagcatcgcccgcaccgcgaccagggcgctgcgcacctcggcgcgggccgcatcgccgtcggcacggtcatccagcttgctcagcagcgtgttgccgttgcgaatcgcggtgaagatcgccgccgtggcgccggagacgttcacgtcgtcattcatcgcggagacgaaatcggcgggaagatcatcggcgctgaccccggcgatctcggcgcgctcgggctgctcgcccaaagccacgccggcgcgctcgatgaagttcatgatgcgttcgtatgcggcctgggcctcgaccagcgcttggtcggaccattcgagcatcgaacggtactgcacggagccgagcgcatagcgcaccacccatgcggagtgctcggccagcacactcggcacggacaggccggtgcccagcgacttcgacatcttctcgcccttggcggtcacccacgccgaatgcatccagcgtgcggccgactcgtatccggcggcacgcgtctgcgccatctcgttctcgtgatgggggaagcgcaggtccagtccgccgccgtggatgtcgaacatgccgtccagataccggtggctcatggccgagcattcgatgtgccagccggggcggcccacgccgaacggcgtcgaccagcgcgcgtcctgcggatcggtgggcttcggcgccttccacagcgcgaaatcgcgcggatcgtgcttgtcgggggatgcgtcggcggggtcgatcggattgtacttgtcgtcgccggccgcatccacggacgggcccatgcggtcagccacggcggcggcctcgtcggcctcggcggcgccctgcttctgatgggtcagctcgccgtaatgcggccagctcgccacgtcgaaatacacgttgccggtcggcttgccatccgcgtcataaactacgtagccgtgaccgttgtcgatgatgcggcggatcaggtcgatcatgtcgatcatgtgcccggtcgcgcggggctcatacgtcggcggcagcacgccaagcgtgtcatacgcctgcgtgaactcccgctcgtagaagtatgcgcgcgcccaccactgctggcctgccacggccgccttgtcgaggattttgtcgtcgatatcggtcacgttgcgcacgaacgtgacctgatatcccagccgcagcatccatcgccgcaccacatcgaacgcgacggccgctcggatatggccgatgtgcggggagctctgcacggtggcgccgcacacgtagatccccacctggccgggcttgatcggggtgaaacgcgagaccgtgtgcgaagccgtgtcatacagcttcagaccggccgcggcgcgcgccacgccggcgttctcggaagtattggaattctgcggttctgaggcttgtgtcataatgtcgagcgtattcgcgttatgcgacaaaccgccagacaaaccacccggcaaatgtgattgcgcggccgcccgggcgcggctggaaatacgaaagatgaagaaacggtgtgcaaagtttacgtaggtgatgcaacaatggagttatgacgcaatcgcaagtgcttatcgtgcagcacgtcccgtgggagaagccggggcgcatcctggacaacctggatgacctgaacatgtcgtccacggtggtgaacatcgccaaggaaaagaagcccgatctgcctgacttcgcgcaggtcgccggactggtgattatgggcggtccgatgggtgcgctggattatgacaagtatcccggtctcaaggtcgaggcgaaactggtcaaggcggccatcagcgtcggcaagccggtgctgggcgtgtgcctcggccatcagatcatcgccaccgcgctgggcggcaaactcagccgtggcgagtcgccggaaatcgggttcgcgccgatcaagcgcgttgacaagcacaattacttctcgatgtggaacaagcagatcgacgtgctgcactggcacaacgacgtggtggggcttcccgccggcgcccagctgctggcgcggtccgagcacaccaaggtgcaggcgttccgcatcggctcggcgctgggcatgcagtttcatctcgaagtgacgccgacgttgctggaggaatggctggatgagtcctcgatggtcaaggacctcaaggcggtgggcggatcgaagtcgcagctgcgcgaagcgttcgccgaatataatccgcgcctgcagccgttggccgagcaggtgttcggcggattcgccgcccgctgcaacacctacgcccaatccctgcgctagcgaactgcgagttcgcccccgccgctggcggggggcgaacatgacgagccagcgggggcgtatggtggttcggacgttgatgcccaccgctgacgctacattggtgagtcatgccgacttatgaccttggattggaacacgtttcactcgccttcgccaccaaaaccatcttcaccgatgtgacgcagggcgtattcgagggcgatcgcatcggcatcgtcggccgcaacggcgacggcaaatccacgctgctgcacctgttcaaaggcactcaggagccggattccgggcgagtcaccaagcgcggcggactgacgttcggcatgctcgaccagcgcgacccgctggacgacgacgccaccgtgcgcgcggccgcgctggaaggccgcgaggattacgagtgggccgccgacaacaagtcgcgcgagatcgtcgaggcgctgctgggcggcatcaacctcaacgcccgcgtcggctcgctgtccggaggccagcgacgccgcgccgacctggcccggctgctgctcaaggattgggacatcctcgcgctcgacgagcccaccaaccatctggacgtcgtgacgatccactggcttgccgaacatctcaagaaccgctggtcgaaagggcagggggcgctgctgctcgtcacccacgaccgctggttcctcgacgaggtgtgcgagtcgatgtgggaggtccacgacggcgtgatcgacccgttcgaaggcggctactccgcatacatgctgcagcgcgtggagcgcgaccgacaggccgatgtgcgagagacgaagcgccgcaacctcgcgcgcaaggagctcgcctggctgtcgcgcggcgcccgcgcccgctccaccaagcagaagttccatgtcaaggccgcgcgggagctcatcgccgacgtgccgcccatgcgcaacgccgtcgaactcaagcagatggctacgtcgcgcctgggcaagcaggtcgtcgacctgatcgacgtcacgcagatcttcgcgaaaagccaaggcgagcagccggtcacgccgaccgacgacacggcggcggatcaggcccccgcctcctcctctcagatcgatatcgtcccctccctatactcggagccgcgcgtgaccggttccgtcgaagtcgccgtcgacacgctcgccgacccgcgtctcgtggacgccggcgtgccggaatccatccaggccgcagcggaagccaaggcgaaggcggaggcgctcgcggaacgtaagggtgtcacggaagagtcggtcgcgccgcaggtcacctccgcggcgcagaagatcaccgtcgccggtcgcaagattctcgacgacgtgacctggctgatcggccccggtgaccgtttcggcatcgtcggcgcgaacggcgccggcaaatccacgttgctcaagctcatcgacggcacgctcacgccgacagccgggcatgtcaacatcggcaagaccgtgaagttcgcggtgctttcgcagcggctcgacgagctggagaaactcggcaaatacaagatcaaggaagtactgtcccgctacaagcccagctatatcgtcgacggcaaggaagtcacgcccggtcagctgatggaacggctcggctttgaatccgcgcagctgatgacgccgatccgcgacctgtcgggcgggcagaagcgccgcatgcagctgctgctgatcctgctggatgagccgaacgtgctcatcatggacgagcccggcaacgacctcgacaccgatatgctcgccgtcatggaggatctgctcgacacgtggccgggcacgctgatcgtcgtcagccacgaccggtacctgctggagcgcgtcaccgaccagcagttcgcactgatcggcggtaaggtgcggcatctgcccggtggcgtcgacgattatctcgacatgatcgaaaaagcgaagaccgcagcgccggcaggtgtatcggcttcgcagaaggagccggccgactccggcgtcactgccacggcggacgacgcccccaagctcagcggcaaggaattccgcgagaccagcaagcgcatctccgccatcgagcgcaagctcgcaaagctggaggagcagaagaccgcgctcgaagcggatatggccgcccatgatccgagcgactatgaggggctgaacaagctcaacgggcagcttcaggccgtctccgacgagtccggcgccttggagaccgaatggatggaattgtccgaaaaactggagtaatcgccgcgcggtgcgcgaccttacttcatcatctcttcatagatgcgcttgcagtccgggcagacggggtattgcgacgggtcgtgcttcggcacccagatcttgccgcacagcgcgaccacgggccggccggtgagcttcgattcggcgatgcgatcgcgcgacacatagtgcgcgaaccggtcggcgtcgccattgtcggaacggtcggtctgctcctcggtttccggacgctccagcaccgccgtccccgtgccctggtccggggtggacagcggcgacaccggatccgcgagatccgcggcgatccctcctgcgacggcggatgtcggcttcagctgtgttgacggttcagatgacatttcgactccattccttcatccatgacgacatcatagcggcgaatggccggcctgtcttccaccggcatagattcatgataatgcccgcatgctaccgctgcatgtccggcgtctgagccccggctcgctcgtatacggactgtccggcgattcgcggtaggctatgcatatgactatcgcagtatgcccaggatcgtatgaccccgtgaccgcgggacatttggatgtcattgagcggtgcgcccgtttttttgacgaagtgcacgtggtcgtggccgtgaacgccgcgaagaccccgatgttcccggcgcatacgcgagtggatatcattcgtcaggcgctcgaccacgacggattccccgatgtcaaggtcgcgtccacgaccggcctgatcaccgactactgcaaggagatcggtgccaccgtcatcgtcaagggcctgcggcagaacggcgattacgaggcggagctgggcatggccctggtcaatcgcaagctcgcagaggtggagacgctgttcctgccggccgacccggtgcttgagcatatttccagctccatcgtcaaggacgtcgcccggcatggcggcgacgtgaccggcatggtgcctgatggcgtggtgccgatgctggacgaggcgttgaaccatgagcgtggcgagtgacgtcgcgacgcgaatcccatatgatattgtctgggttttccggtcgctgatacgtgaccggaataaaagtaaagagatgcagcatggatgaatcaacgaacgatggcatcgtcaacgtcggtgacggcaacgacggcggcgccgccatgaatcccgcgaccggcaccgagccggccgcgcagtcgaccgacgcctacagcgtcacgtatgcggccgcggcgcggctgaacgatgcgccggaaagcgcggcacctgccagcgtgtgggacgaaatgtcgcacaatccgcagccggccgccgctgcgacgcacgagaacaagccggacatatccgattacgcgaagcagtccaagccgacgttcccgatcagtcagctccccgatttgcgcgagacgctggatccgaaggccgacatgaaccccgaggaggtgaagtcccgcgaggagttcaccaccgtctatgacatcatcgactcgatggaggcgacgctggaggccgcgaagaccagcctgttcgcgcccagcatggtgcgtgtggaccgcgaggagttcgccggtcagctggacgagctcaagcggatgctcccggtgcagctggagcgcgcgtccgcgctgatgcgcgaggccgagcggcgcttggaatccgcgcagacgcaggcgaacgccatcatcgcgtcggcgcagagccgtgccgccgacacgttggacgaggccaacaagcaggcgcagatcctcgtcggccaggagaacatcaccgacaaggcgcggcagcgtgcgcgtgcgattctcgacaaggcgcaggcgcgtgccgaccatctgaccaatggcgccgacgagtactgcacgacggtgatgaccggcctgcaggagcagctcggcaagctcagtcacgacgtgcaggcaggactcaacgtgcttgaggaacggcagcgcgcggcgggcgagcagatgccgcacctgaacatcaacgattatccggaagcgcagtaggggcgcgccggagtgtaacggaacgcgcaacagcatgcgcggcagcagcagggaggagatttgtatggcacgaccggaggattccgcatgggcggtcagcgtggcgcaggtggcgtcgcggccggggcagtccaagacggtggatgtggtgtttcccgcgccgagcggcatcggcgatgaggtcatcggcgtgaaggagggcgcggacgtcagcgtgcacggctcgttcgactcgatagtcgacggcctggtgctgaccgctcgcatcgaagcgcccgtcgcggccgagtgcacacgctgcctcaagcccatcaagcgcgattggggtgtggacgtcgtcgcgttcttcccctacgaggagagcgcgaaggcccgctcgcacggcaagcccaagaacgaggacgtggagatcgtcgcgggggaggacgagtccgaggacgtgtatccgctgagccgagacggggcgttcgccgacctggaggcgctgctgcgtgacacgctggtggaggcgctgccattgcagcccctgtgccgcgaggactgccggggactgtgctcgcagtgcggcgtcgacctcaacgagcacccggaccatcatcatgacgtgaccgatctgcggttcgcggctctggccgggttgaaggcccagctggaggccgaggagcacggcgacaagtaacggtgggcgatcggcgtgcgggtctgggaacctgctcgcgcgatgccgcgacatgccgttgtacgggcgatgcgttaagataccgtacgcttaagctcaattgttcgaacgaaacagaggaataacaaatggcactgcctaagtacaagacctcgcgcgccaacacgcactcgcgtcgcgcgaactggaaggctaccgccgcccagaccatcgcatgcccgaactgcggcgctccggcgctgccgcacatggcttgcccgagctgcggctcctaccgcggccgcgtgtaccgcgcagccattcgctccgctcacaccaagtgatcgcagccgaatgccgatagcgaaatgaagaccctgccatcgacgggtggcagggtcttcgtatattgtcgcatattgccatccggacactgcgcgtatgcgttcagggcgtgcgcgtgcggccggatacggtggacaaggagaaaaacatgactgaacctgaaccgcgcgaagagctgttctccgcgctgggcgtcaccatcagcccggatctgctgatacaggcgctcacccatcgttcgttctcgcacgaacaccccggcacatcgaactatgagcggctggaattcctcggcgacgccgtgctggaactggtatcgaccgagacgctgttcacgctgcatcccgacatgaccgaaggccagctggcgaagatgcgcgccaaggccgtttcggaggaggccctgtcggcgatcgcccgggacaagttgcacgtcggaccgttcatcctgctcgggcacggcgaggcggagtccggcggtgccgagaaaagctccattctgtgcgacatcgtcgaatcgctgatcggcgccacgttcctggagcacggcatcgaaggcgcgcgcaaggtcgtgcaccggctcatcgacgacacgttggcggaagtggccaccgaaggaccagccttggactggaagacctcgctgaccgtgaaggcgcacgagctcggcctggatgagccgcggtaccgcatgagcgtgtccggccccgaatacgcgcaggaattcaccgccaaggccaccatcggcccgaaagacgacatcatcggcaagggtaccggcaccagcaagcgcaaggcgcagctcgccgcggcagaaatggcttggcatgagctcgaccggtacgcgcccgcgctcaaggcggcccgcaagaacggctcgtccaagcaccggcgcagcggctcggccggcaactgaccaactggtgaacggcgattgcgcgatgctgtcacctgtatgcttaaactgagaaaatacgaatcacagacgccatagccacaagcgaacgcgcatcgtgaccgtcggcgcacgcaagtcatgaacgctcgcgaggcgcgacgggtccaggcatatgaccgaacgatttgagttgagaggacatgatggctctacccacaccattgcaggcgttcagcggcgttccgaaaaacaccgcatccgcagacaagcagacgatcatcgacggtgagaaaatgaccggcgcgcaggcgttgattcgcgcgctggaggatttgggcgtgcaggacgtgttcggcctgcccggcggcgccatcctgccggtgttccacgcgatcaacgacgatacgaagttccggttcacgctcgtacgccacgagcaggccgccggccatgccgccgaaggctatgcggtggcgacaggccgcgtgggcgtgtgcatcgtcacgtccggcccgggcgcgacgaacatgatcaccccaatcgccgacgcgaacatggattccgtgccgctcgtcgtgatcaccggtcaggtgggcgtgaacgccatcggcaccgacgccttccaggaggcggacatcgttggggcgacctatccggtcgtcaagcactcgtatctggtgacccgcgcacaggatatcccccgcgtgctcgccgaggcgcactatatcgcccgttcgggccgccccggcccggtggtcgtggacctgaccaagaccgcgcagaccggcgagatgtattattcgtggccgcagcgcatgattctgcccggttacaaccccaccacgaaggcgcacggccgcgtgatctcggatgcggcgaagctgttcgcgcagtcgtaccgtcccgtgctgtacgtgggcggtggcgcggtgcgttccaacgcgtccgccgaagtggccgaactggccgaagtgaccggcgcgccgatcgtcaccacgctcccggcccgtggcatcgtgccgaactcgaaccccaaggcgcttggaatgctcggcatgcacggcaccgtcgccgccaccgcggccgcgcagcgctgcgacctgctggtcgccatcggcgcgcgctttgacgaccgtgtgaccggcaagcttgacgcgttcgcacccggtgcgcgggtgatccacatcgacatcgatccagccgaaatcggcaagaaccgcgctcccgacgtgccgatcgtcggcgacgtgtccaccgtgctcaacgacctgattcccgaaatcaagcgttctcaggccatcggcggcaagccgaacctcaagccgtggtgggacgagctcaaccgcctgcgcgaggaatatgccatcgattacgatcagccgtgcgataagccgaccgatggttcgctcgcgccgcagtgggtcatcaagcagctgtccgaccatgccgacccctccacgatctgggtgtccgacgtcggtcagcaccagatgtggtcggcccagctgattgatttcgagaagccgcattcgtggatctcctccggcggcctcggcacgatgggcttcggccttccggccgccatcggcgcttcggtcggctctcaacgcgacttcaagggtcgcaagccggtgtggctgatcgcgggcgacggctcgttccagatgacttccgaagagctgacgaccgcgttcctggatcatgcgccggtgaagatcgccatcatcaacaactccgtgtacggcatggtgcgccagtggcagactctgttcttcgagcagcactactcccagaccaacctggctgacggcgattcgaaggaaagcggagagttcttcgacgtgcctgatttcgtcaagctcgccgaggcgtacggctgcgtcggccttcgcgcgttcaccgaggacgaggcgattgacgcgatcaacaaggcgaacgagatcaacgaccgtccggtgctgatcgacttccgcgtatggaaggacgccatggtgtggccgatggtggcagccggcgcgtccaacaacgaggtcgcgtatcgtccgggcacgcagccgctgctgcacaagggcgtcgacgatggtgaccaggcgtgacggcacggttgtcaaggaataaggagtaagtgattatggctatgtatcccgcttcccgcctcggttccgagcgtcacacgctgtcggtgctcgtcgagaaccgtcccggcgtgctggcccgcatcgccggcctgttcgcccgtcgtgcgttcaacatcaactcgctgtccgtctcgccgaccgagcgtccggacatttcccgcgtcaccgtgaccgccgacgtggaggccgtgccgctggagcagatcatcaagcagctcaacaagctgctgcacgtgctcaagatcgtcgaactcgatccgaacaccaccgtggagcgtgaactggtgctcatcaaggtggcggcgaacgagtcgaaccgttctgacgtgctggagatcgtgcgcctgttccgtgtgcgtgttgtcgatgtgaacccggagtcgctgaccatcgaggccaccggcgccgaaggcaagatcgacgcgctgctgggtctgttggagcactacggcgtgatcgagctggtgcgttccggcgcggtcgccgtgacgcgcggtccgaaggcgctgagcgaaaaggtcatcggctccgagatcaagggccgctgatgcggtatcggcgtggccgagcatgacattgccgggcgggttctttcccgcccggtttttgcttttgcggtgatgctcatcggtgcagcacatcgcgcggattccccggaatcttgaagaaacggcgtctatcgcgaaagcggacattgtggaacatgccgtgcgaaatatgaaataatggtggggaagcgttgcaggggatcgatgccatcgcacagtctggttccgcacaatcaggttcggtacagaccggcacatcaccgttcgccatgacagcgcaatccaattcatcgcaatatgagccactggaaccttacgatacgatgacgggcactgcgattgccatcagcgatgccgacgaggccgaagccctatccgaatacctgacgtccccccgaccgccagcatcccgcggtagtggtgacccgtcacttcggcaagcccctgttcgacgcgaagagcctcgcctcgaatctgcatgatgtcgccgccgtattcgacctcgtcaccccgaaagcggcgtggggggggggtgtcggcagccctgccggaaggcgccgccatgacgcgcacgcaattcgactcgatgcaggagctcgtcgaatttatcaccgacgacgacggccatatcgacgagtccgccgccgacgaggtgttccagtacctcacccagctgcagggcgaggcgcggcatcttcgcgagggcctgaaggtctccaacggcaggttggagagcatgaagcagaagatgatgcagaagcagcgcgagaactcgtacagcgacggacgccagtactacaagtcgccgctgccgctgttcgccgacaaggcggagggcaagcggttcgagcgcgagcagatggacatgctggtccgccgcgaatgggccacgcggttcggtccggaagagaagaaaagccatgcgctgccgaggacatgggcgtattccgactggttcttcgacacgctggcatccacacacatcagcgtcagcaaggtggtggccgtgatggtcgaggtgctgaccgggcttgacatcgagctcgcggggcgagaaggattacagtacggtgatttcggtggggattaccggctcgcctttcatcaggctttgcgcggtgatcggcagttcgcgcagggccttggcccggtattcgtgcgcgtcggcgatggcggcgtgaccctgataacgcgaatcgatgtcaccgtggtcgacgtagtcgaccagcaggtccttccatccctcagccggacgatactcggccagctgggtttccgatccggagatcacatgttccgtctcggccagaccatactcatatgaacggtaggcgagcttgcggccgggaacactggctttgtccttcgacttcttcgccacgggctgcatcacgccagccgaattctcgcgctcggtgagcttgtacaccattgcgcaggtcggggcaccggagccggtgaccagcatcgtgcccacgccgtacgagtccaccggcgcgctctgcagggcggccagcgcgtactcgtccagatcgttggtgacggtgatcttcgtgttcgtcgcgcccagggcgtccagctggttgcgcacgcgctgcgccatggcggccagatcacccgaatcgatgcgcacgccgcccagctgaggaccggcgacctccacggcggtcttcaccgcctcttcgacgttgtacgtgtccaccagaagcgtggtgttgcggccaagcgcctcgacctgcgaggcgaaggcgctgcgctcgtcatcatgtacgagcgtgaagcagtgcgcggcggtgccgatggccttcagtccatacagctgcgccgcaagcaggttcgctgtgccctggaaaccgccgatgaccgcggctcgtgcggctgccaccgcggcccactcgttggtgcggcgcccgcccatgtccatgcaggggcggtccttcgctgcgctcaccatgcgcgaggcggcggatgcgaccgccgaatcatagttcagcacgctcagcaccagtgtctccagcagcgtgcactcgccgaacgtgccctcgacctgcagaatcggcgaattcgggaagaacatctcgccctcgcggtagcccttgatcgaaccggagaaatgcaggttctccagccacgaaatcgtctccttgctaaccaccttgcggtcggacaggaaacgcaggtcctcgtcgctgaggaggaaccgacccagctcatccagaatgcggccgatgcccgccacgacaccgtaacggcggccttcgggcaggtggcgcgtatacacctcgaacacgcatttgcggttcgccgtgccatccttcaggctggcgtccagcatcgtgtactcatacatatccgtcatcagtgccggtgaataatcgaccatgaccgccctcccgcaagacaagaatcgtgtgttatccaaaaccctagtgtcgcgcggcgactcgcgcaagagccattcggcgtgacggcggtcacgatggctgctgcagcggcggcgggagacgtgccgcgctgcgggcacgttcgccgcatggtgctacgttgaaggcatggctgaaatcaaagacatgttggacaaggcaatggtgattcgcgcggacggccgcgtagtggacgaactgcgcccggtgcgcatcacgcggcacttcacggatgtgcccgaaggatcggtactcatcgaatgcggcaacacgcgcgtgatgtgcacggcgacgttcacgccgtcggtgccgcgctggcgcaaggattccggactcggctgggtgaccgccgaatattcgatgctgccgcgagccaccgccgagcgcaccgaccgcgagtcagtgcgcggcaaggtcggcggccgcacccatgagatcagccgtctgatcggccgctgcctgcgcggcgtcgtcgacatgaaggcgcttggcgagaaccagatccagatcgactgcgatgtgctgcaagctgatggcggcacccgcaccgcctcgatcaccggcgcgtatgtggcgctggtcgacgcgatgcgctgggctgagcagaagcgccacattcgttcggccgaccgcgtgctcaaagacgccgtttccgcggtgtcggtcggcgttatcaacggcacgccgatgcttgacctgccctacatcgaggacagtcaggcgatgaccgacatgaacgtggcgatgaccggatccggtgacttcatcgagatccagggcaccgccgaacaccgcccgttcaaccgcgccgaactcaacacattgctcgacctcgccgaaaagggcaacaaggagcttcaggccgcccagcgtgccgccctctcgctcgattgaaacgagtcgggcacgccgccggcgggcgatcggcctcaccccgtcatgcacaaccataggtaaggaataaaggacccccatgaaactcgtcgtcgctacgcacaacgaaggcaaactcgttgaaatccgccgcattctcgaagaggatctgggcgcggacgccgctcaggtggagcttgtctccgccggcagcctcggcctgcccgacccggtcgagacgggcgtcaccttccaggagaacgcactgctcaaagcgcggtttgtggccggtctcaccggcctgccggccatcgccgacgactccggactgattgtggacgtgatgggcaacgcgcctggcatcctgtccgcgcgctgggcgggggagcatggcaatgatccggcgaacaacgcgttgctactcgcccagctctccgacatcccggacgcggcgcgcacggcccgtttccgctgcgccgccgcactggccgtgccggattccgcggctcctgtggcgggcgggaggcacgccatcgtctccgaaaccgtcgaaatcggcgaaatgccggggcgcatcctgcgcgcggcgcgcggcgagcatggtttcggctacgacccgctgttcgtgccggacgaccagccggagcgggccgctgcggaccatccgctgaccagcgcggagatggacgcggcggaaaagaacgcgatttcgcaccgcggcaaagccatcagggctctcgtgccggcggtcgaggcgctgttgcggtagaatcacgctctcaaaactcgcagatacaaaaacgggtttttgcggttttccgctattttccgccgtttccgcgaaatcggtgaaatcgtatctgcgagttttgagagcgcatgttcggcactcacgcgggaatcacgaaattcacgatggtcatcagcacgattgagatgaccgcggtgatggacagcgtgaacccggcgagcttcgcgttgccgagtacgcggtcggtgaacagtgtcgagaacacggccgtgggcgcgagcgacagcatcaccgccgtctttcgcacggacgcatcgaacggcagaaggaaccagcaagcggccgcgaacagcacgccgagcggcaagcgccaaccgagcacccgcagcacgctgccgacatccttgccggtgcgcggcaaatccatcagcatgcccaccatgaacaccgagcagaacgagttcgcgtccgccaccggctgcagcagcgtcggcacgaacgccgggatgtgaatgctgaagagcatgaccacgatcatcagcagatacacgttgaacggcaccgaagtaaggaatcccttgaggatctgcctggccttcgcgcggcgggcgagcctgcgggcgtctttgtcccgtggcttcgaatagggaagtgtcggcgcggctcccgcatgctgttcggtgagcggccggtccatgtcgatgtgcagcagcgacgtcgtcatcacgtttgagccggcggtcacgatcacggaattgccgatgtcgaacatcgaggcggtgaccagcgccgaaggccccatgaacgtctggattacggggaagcagaaattgccgatgttgaatccggagcagttgagcatcaggaacgcgcggtccgcgacgggcttgtgccgggtcgccgcatacaccagcagcagcggcagcaggccgaagacgatggcgaacaccgagatcagcagcatgctcagatgatgcgggttcgtggcgaacgagacgatgatggaggcgggaagcgtgaaatcgaacaccaccacctgcatgacgcgatagtcgcgtggcttgaacagtcccgcccgcttgaccagatacgcagcgacgatgatgagcagaaacgctatgggtttcagtatcgcggtcatgcttctctattccctgtggcgattgcggaggtatggttccgcgtgcgcgagaagggacttgaaccctcacgtcaaagacacaggaacctaaatcctgcgcgtctaccgatttcgccactcgcgcgtgccacccgtcgaaacggctggatatacaaaaccctaggcgcggagcctaggggtatggagccacttgacagaatcgaactgtcgacctgctcattacgagtgagccgctctaccgactgagctaaagtggcatgctgccgattcgttgatgaacctgcgcacaagaatgagactttactgtatgccgtggatttatgcaagttcggctggcatgtcgtgcgcgggcatgtcgtgtcggtcacggttgttcatcttgggtatttttgtttgtttctgtccgcttttgtgagtatcttggtaagcgaagtaaccggtgtggcccgccagcattggagagccgactccggcgtacagtgatgatgaaaggaccaataccatggccatcaatccgccagttgacgccaccaagacccccgagtgggccgcgctgcagaagcactatgacgagctgcaggccgagggcgtcagcctcaagcagtggttcgccgatgacgccgagcgcgtcgacaagctgtcgttcgacgccggcgacctgcacttcgacctgtccaagaacctgatcaagccggagaccctccagctgttcgccgacctcgccaaggccgtcaagctcgacgagcgcaccaaggcgatgtacgccggcgtgcacatcaacaacaccgaggaccgcgccgtgctgcacaccgcgctgcgccgcccggtcgaggacgagggcaagtacatcgtcgacggtcaggacaccgtcaaggacgtgcgcgaggtgcttgaccgcatctacgccttcgccgacgaagtgcgttccggcaagtggaccggcgtgaccggcaagaagatcgagaccgtcgtcaacatcggcatcggcggctccgacctgggccccgtcatggtgtacgaggcgctcaagccctacgcggacgccggcatctccgcccgttacatctccaacatcgacccgaacgacctggccgagaagaccaagggcctcgacccggagaccaccctgttcatcatcgtctccaagaccttcaccacgctggagaccctgaccaacgcccgtgaggcccgcacctggctgctcgaggagctcaaggccaagggtgccatcgacggttccgacgagaagaatgccgaagccatcaagaagcacttcgtcgccgtctccaccaacctggagaaggtcgccgagttcggcatcgacccgaacaacgccttcggcttctggaactgggtcggtggccgttactccgtcgactccgccgtcggcacctccctggccgtcgtcttcggacctgcccgcttcgaggagttcctgcacggcttccacgagatcgacgaatacttcgccaacaccccgttcgagaagaacgtcgtcgtgctgctcggcatgctgaacgtgtggtaccgcaacttcttcaaggtcgcctcccacgccgtgctgccgtacgaccagtacctgcaccgcttcccggcctatctgcagcagctgaccatggaatccaacggcaagtccgtgcgctgggacggcaccccggtcacctccgagaccggcgagatcttctggggcgagcccggcaccaacggccagcacgccttctaccagctgatccaccagggcacccagctcatcccggccgacttcatcgcgttcgtcaacaccccgaacccgaccaaggacggcgaccaggacgtgcacgagctgttcctcggcaactacctcgcgcagaccaaggcgctggcattcggcaagaccgctgacgaggtccgcgccgaaggcaccccggaagagatcgttccggcccgcgtgttctccggcaaccgcccgaccacctcgatcttcggtgtggctctgaccccgttcgcgcttggcgagctcatcgccctgtacgagcacatcaccttcgttgagggtaccgtgtggggcctcgactcctacgaccagtggggcgtcgagctcggcaagcagctcgccaagcagatcaccccggccatctcccaggacgacgacgccctcgccgcccaggacgcctccacccagtccctgatcaagttctaccgcgccaaccgcgagttctgatctccgctcctgtgtcgcttcaatcagaactcgcggttggcgcgccgcgctgtgttgtttgatggtcggtctggcgaccgtccatggcgcgagttctgattcgtcggttcggctctagcagctgaactctgatacgcatgtgccccggcatcttcggatgctggggcacattgctatatattccgtgcgacgttatatctatgacctgtgaactggggtggtgttccgggtcaatgagatcagccgtgggaaaccgcttcattgcagtgttccttgcattttcatgcgcactctttggggtaatcgatacattttcatgaggaccttgtatttggggtgtcgggatatctgtgattgaccacccccccccagtctcacttcgctcgacagtccccgggcttaacatcgtgggattggcctagcggggttgtgttgtggctgataagatggcgtcgattatgtcggattgggattcgggcaatgggagatggtggtgatgaaggcgcagaagagttgggatacgccggtcgccgatgagacccgcgatgtgagcgatgcctccgaggacattcacggcatcaccgacgacatcaccgacgacgccgaatccgccgaggtcgatgccgaggccgtcacactgctgcgcaaacggcaccgccggatgacgctgctggtcgtcgtggtcatcgtcgcatcgctggtgagtggattctgctggcggcgcagcctccagaccggctcccctgtcaactgttcgcaccagaccggagtcgcggacgagaaggactactgttatggcgggttcaagccgttgcagccgtccggccctcagctgggccgatcccaggccggcccgtatttcgcaaaggcggtgaaaggcacggccgcggcatacgacgccgtgcgcctcgccgcggtcggcggcgacaaggatgcggtgaacaagtccgccgccaaggcccgtgacctctcgcaacaggcggcggagaccctcgccgcccgcacctggccgaaatcactgaccaagcagatccgcatggtcatcatcgaatatcaggagcgcgcggcgatctataccaacctcgccggcaaccgcaacggcgaggcgatcgactggatggtgttcggcgaattcaggccatccggagcgcagcaggtaatccgcagcgcgctgagactgcccgacgagccggagacggccgtcccgttcgacatacgggacattgccgacggcggagcctgcaagggactggagaccgccaaggacggcggtcagcaggaagtcgaccggcactgtttcaccgtcaccgtgaccgaccaggtctcggccgagataacggggctgtccatcaaattcaatcttctgagcgaagacggcaccatccgcgagaccggcgtgagggccagctccgacatccagttcgatgacgatggcgacatcatcgagcacggcggcatccataagggggacacggtgaagctcaccatggaaatcgacccgaaactgctgcgcggcggcgaccgtttcgtgccgtcggcatggtatgtggaggacaaggcgggggagcagcacctcgcatcgttcactgcggtccaatcaggcggctatgacgtgctgaacgcgttcaaggtcaggtgacggcaatgtcagaacatgatttcgacggcgacgatgacatcttcagcaagtccggccggttcggcgggaacgccgagaaacgcaaggaccccgccaaaccaggcggcttcgggaaatccggcaatgcggggaagcccaaggactccaccgcatcttcggccggcgaaggcgacgcggaggcgatgcgccatctggagcacgagttcgccgcgatcgaccgcgaatcgcatcgcacggtggccgtcgtgttcgcggccatcgcggccgtggtggcgttgatcttcttcgggctccagatccgcgacaaaaccacgctgctgatattccatgacaacccgccgatcggctacctgccggtcagtgaatattcgctgcgacagccgtccacaggcaagccgatcagctcggcgcgcacatggcattaccccagccagtacacgattctcagcgacgacgccaccagcagcggcgtcaagcgcggcgcacggtgccgtatcgacaagagggattgcgatcatgcgctggtcacgtcccgcggcgtccagccgggcgacagctggggcgacttcgtgaagcgatacggcgacgtgaccgcgtacgagataacggtcgacgacaacgagagtggccgggacgattcgtacatgtccgatgaggaccaggccgcggcgtccgacctgcgcgagcaacacgggattaccatagacgatttcgaccgtgactatatacagaccggcaaggtcgacctgtcccggaaccggctgaccgtcaggttccgggcggtgctctacgacacgaccgtgctgtacaccgaggccgaccagtggggaggctatctcgactccacccaggaacggcattggcgtatcggtggccggtacggcacgatgttggcgccgaaccggcagagcttcaacctggaattcgagttcgccaacagcgcgacatgggaagggctgggcgatggtgacctgatcagcatctccagttcactgtacaactagcgaggttatgcatggcaaggttacacgacagtcggcacggttccgatgcggacggcatcgatgacgacgatatgccgctcacccatgagcaggccgtcgtcgaagccgacgccgaactccggcgtatgacttaccacccggtgcgcaaggcggtgggcatcgtcgtggcgatgggcgtcgccataggcgcgtcgctgggtgtcgggtatatgttcggcggcgatccgggcggcatcgtgaccgcgatcacgggcgtggtgtgcccgcaggacgccaaatacgccctggacggcgacgcgccgtttgtcaacacgtccgacacctcggagcatcccgccaagggggccaggctcagcgagaaggacgcggggcagtactatctggaagccgtcaagccgtcgatccagccgttgcgcgacgcgatgaacaccttgtacggcggtgatctgaaggccacgagggccgccgcgggaaaggccgccaccgtgctgcgcgccaccgccaaggcgctgcggtcacgcacctggcccgatgaggtcgccaatgcggcggccgtcgtcgccaacgaatacgacgccaaggcccggcaggcctcgtatgtcgccgactcggtcacgccgtccgccagcgacgagctgatctcgctcgatgcctacggcgtcagcgaagcggatgtctacctgcgcggcaagctcgggctgcccgccgccgaggcgccgtccgcgccgctggagatcacgggcatcgaggaccggggcatccagcagggggcggatgccggcgggtcgaccgtggacaccggaaagcgcatcatcgccgtgaccgtgcgcagccacgtgcccggcacgctcagcgggctgaacctgacgttcgatctcaagaagggcaagacgacgctcggacgcatcagcggaatcatggacgacatcgcgctcgccgaagggcaatccatcgtggttccggtccccgtcgatatcggcggggacgacggcgggattgccggcgccaccatgagctgggacagctggtcgttgaccgattggcgcggagaaagccgtattgcggcggccagcgacgacttcgccgaatacgccccggacaaggtgatgggtacgttcacattgcggtagacgccggggccagaagcccgcgagcgaatttgtggtgaaggatacaggctccacaacatggcggactcgtccgctatgacaggaacacaggaatcgccggtccatgactcattctcgtcatgccggggattcaaatagccgatgaaggagcaggaaggttcctatgcaattcaagaaactcatcgccggcgtcgcggcggttgcggctgccttgggcggcatggccttggggaccatgacggtcaatgccgataccgatacgctcacagtgcccgaaacggccacgccgtcaaccattaccctgaacaaggccgatgatgccgatacatcgaaaagcacgtatacggcatatcgtatcgccgcgtacatcgacccggtcgcgaatgccgacgggcaagctgacttcctttggcctgaaggccgtggacagcgacaagtgggacggcaacattcgcgaggccatcgccgtggccggcaaggatgggcagaagctcgtcctgctgtacaacgccgtcgtcgccaaagccgccgtcgacgatcaggtgacgaactccgcgaccgccaattacaatggcggcgccgattccgaggccgccaccacggtcgtcaagctgggattcttcaccatgaagaagatcgacaagcagcacaacggcatcggcggcgccctgttctctgtcagcgacagcggcggcaacgccgtcgtcttcgagaagggctccgctaacggcagctgggtccgtgccgccgaccagagcgtcaaggtggacaacgtgacctacttcacgagtattccgaccaacgcaggcgggctttcccactggcgagccacgcggctgatcattcgcggcgggcagattcatgacgcggattcatgacggtcacgtttaatccacggcggtgatttgctcggcatcccatttgacgccgaggacctcgggcgtgggtgactgtttcgatgctgctttcgatgtcgatgttgctgctcatgtgggtggcgacgacggtggtgatgaccaccagatcatcgggaagatccgaagccgcgatggactggacgatgaaaccgggctgatgcagggcgttgaacaccagcgcgcggatggcctgctcgtccttacgcaggcatttgacctcaagggtgtaacggatgccctcggcctcatgcgattgcgcggtgcgccgggcgtcgatggccgcgccgatcggccggagcatcatgttggcgagcatgatggcggtggccccgattgcggcggccgcttccatgccggagccgcacaacgtgccgaccgccgccgacgcccatagcgtggccgcggtgttgagcccggacacggacacaccctgcttgaggattacgcccgcgccgaggaagccgatgccggacgccacctgcgcggccacgcgcgtggggtctccggtgccggccgcgagcgtatagacgccaacagtggtgaacaggcaggaacccaacgacaccagcgcgttcgtgcggatgcccgcgctgcgtgcgcgcagctgccgttccaatccgatgagcgcgccgagcccgatgctgagcaggatgcgcagggttatggcgaacacctgtgatgtgacgattgcggtccagactgtcatgatcagttccttcgtttgaatggatgcgggagacggtggtggtacggggagaggatgataacgcgggggtgcccgcccggcgctcctgcggattccatcggttccgcaggagcgccgggcggtcagaagtcacagcagcggctgctgacggtgcagatacagggttctgacggcaagtaccgtcacggcataaccggcgatgacgatggcgagcagcgcgaacagcgacaccggaggtacgtggaaacccatccatgcgccgaccggcgtgaacggcagcgccgtggcgatagtcagcgccgcgagcgacgtgcagaccagcggcaccgacgcgcggctcccgatgaacgggacgcgttcggtgcgcagcatgtgcagtgccgtgatctgggtccacatcgacacgacgaaccatcccgtctggaacgcggcgacgaacagcagacgcgacccatccccgtgcagctccgggaacctcccgcctgcgacggccgggcagagcagggtgagcaacacggtgaaggtgaccatatcgaacagcgagctcaccggcccgaagcgactcatgaaccgggcgatagacgccgtgtcccaccgggcgggggagcgcaggacatcgccgtcgacgcggtcccatgggatcgcgagacaggccaggtcgtatatgaggttcagcagcaccatctgcacgggtgccatgggcacgaacggcaggaacgcgccggcgatcatcaccgagatgatattgccgaaattcgagctcagcgccagcttgatgtacttcatcatgttgacgcaggtgcgcctgctttgcgtgatgccgcgcagcagcacgtcgaggttcttgtgcgtgagcatgacatccgccgactgtcggacggcctcggagccggtgctggcgctgatggcgatttcgctggcgtgcatggccggcaggtcgttgacgccgtcgcccatgtatcccacgcaatgcccctcgcggcgcagcagtgagacgatacgcgccttatgctcgggagtgagcttggcgaacacgttcacgcggcgcagttcggtgccgagcgcggtgtccgtcatgtcgtccagcgttcggccggtgaccacccgtcgagcattgatgccgactttccgggcgacggtacgggccacttgcggctcgtcgccggtgagcatggtcacggtgatgccggcattgtgcatgtgggcgatcgtgtcggcggcatcgggtttgggcaggtccaggaaagtgaggtagcccagcagggtgagcgcgcggtcgtcctgcactgaggtctggtctgtcacagagcgctgcgccacgagcaggacgcggtatccgtgcgccgccttgtcggccatcagccgctcatatgttccgcgcagtcgatcggtcagcggctctgcggttccattgcgcatgacggtgtcgcagcgggacagcatttcggagacagcgcccttgacgaccatgatgcggctgacgttcccggacgttccggcgccggcgcctctggtctcactgatatcgctgccacctgtgtgctcgcggtccgcgtggtgatggctcttcgcgacgatgacggtcgcccggcgtcgtatcggatcgaaaggcgtgcctccctcgacctgtacgtcgccggtatcgtttgccgagtcgtcttcgactgcgacgatggcgtcatcccacggattgctcgtcgtgtggggaatcagtgtggtcagccgtgccgcatgcagcacgtaggacgagttcaacccgctcatgctctgcgcccggtcgagcttgatgacgccgctggtaagtgtgccggtcttgtcgacgcacagcacgtccatgccgcccagcgtctcgatggcgtcgagccgcctgacgatggccttgccggaggccatcgtccgcgcgccccgggacaggcagacggtgacgatcagcggcagcatctccggcgtgagccccaccgccacggatacgccgaacagcagggcctgcagccagtcgccgcccgcgatgccggtgaccagcatggacacgggcacggtgaccgccgtgaacgccatcagcatccaggacgtggagttcatgccgcgctcgaagcgcgtgcgcggccgctgccattggaatgcgcgtgacagtccgccgaacagtgcgctgcggcctgtggcgatgacgaccgccaacgcggaacccgaaatcaccgtcgtgcccatgaacgccaggcacgccgcgtccgtcaacgcggtgtccctgtcgccggcggcgagcagggcggcagcatccttgcgcacgggcatgctttcgccagtgagcgccccctgtgcgatgcgcaggtctcggctctccagcagcttgcagtcggccgggacgatgtctccgacggacaacgtcacgatgtcgcccacgacaagctcttcggacggaatctgccgctcgccggcaccgacccgccgcaccgtcgccgtggtactcaccatggtggccagcgccgtggcggcatgcgagcttcgggagtcgtgcacgtatcggatcagaccggacaccaccatgagcaggatgatgcccgcggtcaccggcgtgccggtatggtgttgccgccgtaagcccgacgcatccggcgaacctcgtcgggttccaagccggattcgtgcgcatacaccaaggcgagcgtggcctctggcgtggcatgggcggcgaaattcagtcgctgggtgatgctggcgtggcgttcgccgcgccagcgtatcagtcgtagcgtgttcatgattcctccttggcgattcggggcggtccgttccgctgtcgggttgatcgttgtttccattgcggcagttggctgaggcgggtcaactcagtccgtttcgctggcttcctcggccggtcgggtggcgtttgccgggttggcggcgtcgatggtgatgatgtcgtcatcggcgtcgtagtcgaacagttctccgtatcgaccccacgtcatggcgatgttgaactggcgctccgcctccgtgtccgtatgacgggccctcagcaggtcgacgatgagctcgccgcgcaggcggccgtgttcgctgtgacggaccgctcggtcgatgatgcgcaccagcggtgccttgtcttgcagcatggcggcgaacatcgtcttgcttgtcagaatgtccgcctgcctccactggcgtccgagctcggtcaatgtcacgtgtccgttctcgacggtcagtaatcccagcatggttccggcgtcgatcagcgggaacaggtcgtccacctcgaatgacagctcgtcggccagatcggccaggtcgatgccctgcgcgtgatcgtatacgatctccaccagtccggccaggcctcccggcgtagcgttgggcagcatgtcggaggatgcctgatggtcggcgttgctcgcccgggccggggcctgatccgctgccgcggtctggttcgccgcgccatctgacgtgccatgcgcgacgccgtccccggcggccgtgcgctcgtcggcggtatccgccggcccgccatcacgactctgcccggtcaggatcgcatacagggtgtcgaccatagcctcgaactgggcggaatgacggtcgcggggcctcggcagggtgacgggcatgtcggcgatgagatgaccgggatgcgagccgagcaccacgacacgatccgccatctgcacggcctcctcgatgttgtgcgtcacgatgagcaccgacttgatggaacgctgattgccgctccacatcttgagcacctcgttgcgcaggttctcggccgtcagcacatccaatgcggagaacggctcgtccatgaacagcgcatcgggctgcaccaccagggcccgtgcgatgcccacgcgctggcgcatgccgccggagagctccttcgggtacgcgttctcgaatccgtccagtccgatggcgtcgatggcctgcagtgcagcgcgacggcgctcctcgcgcggcacgccgcgggcctccagccccagttccacattcgcttgcaccgtgagccacggcatcagcgcgaaggtctggaacacgagtcccactccgggattagggccggtgatgtcggtgccgcggtaggtgacggtaccgctcgacgcgggtaccaggcccgccaggatgcgcaggaacgtggattttccggcgccggaccggcccaggatcgccacgatctcgccctcatgcagggtgaaggagatgtcgcgcagcacggtcagctccttaccgcgctcggcacggtaggtcttgcccacgtgctgcgcctcgatgatcgcggtgccggcggcgttcgtcgcggcggtctgcgggaaggttgcggtgcggtcggaaaaagttgcgatggtcatgataaatggtccttgctggtacgttttttgcggatgatcgcggcggattcgaatgacatgcgctcgccgccgatgctgttggattgttgcgggtcgatgggccgggacggccggtgcggcctccgtcaggcgacggagaaacggcgctcggcgtacgtctgcaatggacgccagaacagccggttgacgcccacgacgaacacactcatcacggcaaccccgatgatggtcttgccggtgtctcccaccgcggtcgcattggcgatatatgttcccaatccatttgccgtaagcgtggtgtgcccgtaggtcacgatctcggagacgatggaggcgttccacgcgccgcccgccgcggtgatgccgccagtgcaccatgagccgaacaccgccggcaggatcagcttggtccaccgctgccgcgtgtccagatggaacgcccgcgtggcctcgcgcaggtcatcgggaatggccgaagcgcccgcaatcacgttgaacaggatgtaccactgcgttcccagcgacatgagcagaatgctgccccagctgatgtcgatatgccaggcgatgaaccacagtgtgacgaatgggaacgtgaagttcgaggggaagctcgccaacacctgcaccagcggctgcacgaaccgggaaatccgcggattcatgccgatcttcacgccgatcggcacccagatgatggagcacaccacggtcagcagcgtcacgcgcatgaacgtgatcagtcccaggaccatcgcgtggccgacctcggcgaacccctcgccgtccgagatgaaacgcaccagcatccacaggccggccaggcaggccacagccatgagcgccatgaacgcgatgtcgagcgtgcgacgccgggtgccggcggccggccagcgtgcgccggtacggcccagcgggcgggtcagccagaacatcagattggcgatgggccggcccacgagagccagcgcatccgaaatgccggaacgccgcagaaccgacagcaccagactcgtcttggcctgcacggactcgttctgcgtgatgcggaacttctcggcccacgccgtcagcggcttccacagcagcacgtcgatgagcagcaccacgatgaccatggtcacgatggcccacagcaccttgcccagctgttcgtgctcggacgccaccgccacgaagctgccgaggccgggcagtgcgtacgtcctgttgttcacggagatcatctccgaggccgtcaggaagaaccagccgccgccgacgctcatcatgcagttccacagcagcggaatcatcgaattcggcacgtcgagcttccagaaacgctgccagcgcgtgagctgcatggagcgagccgcctcatccaactcctgcggttcgctgagcagcgaatggtagaaggagaaggtcatgttccacgcctggctggtgaagatcgcgaagatcgacgccgcctccacgccgagaatggagccggggaacaacaccatccaaatggtgaccgtggcggacaggaagccgaggatcggcaccgactgcaggatgtcgagcagcggtatcagcaccatgcgcagtcgccggcatcgggccgccgccaaaccatagatgaagctgaacaccagtgacaaaaacagcgcgatgaacatgcggaacaccgaacgcagcgcgtaatacggcagcagatgcaaatcgtcgctcacagtgctcggcacgcctgacgggccgatcggttcgttgatttgcggcagcagccaggcgacgacgccgaacagggcgagcacgcccgcggccaccaccacgtctgcggcgatgcggcgcgcggcgccgctgcgggacatgtcggcggcgtcgacgtcggaacgcggacgaatgccggggaacgaggagtaattgaagaagttggacataacggaacctgtgcgctctcatgtcgttatctcgaaggagataaacggttcccgttcggtgggcgttcgactcggtatccgtgccgcaaatgcgcgtcatgggcgtcggcggtcgcgtgcaggcgcgccgatatgcgggtatgtctgcatgcagatagccgatcggcgtcgtcatatgatgatgccgatatgccgggagtccggagaacgggatgtggattcgcgattcaggcgttcggcgcgtacgtcatgcgggatgtcgcagccgtcgtgaggcggtgaagtcgatgcgagccgaatcagtcagtgatcggatcgccctcgccggatgcggcggtgtcgtgacggacggccaatgccatggtcgcggtacaaacgtgtgaagagaatgggccgtatgctgcgcccgatggcatgtgatgttgtccgccatcgcgcagccggctactatgacctaaatcgccgtccatgacattcacctcctcaatggaaccagtacgccgtcggacattgacgacatgaggaagtgcgacttctcgaagagttgcccctggtcgtgtcatcgttcaagcttcagcatcgcagggcggtggagttgcgttagttcatgccttaatccgacaagaactgctgacctgcgtgcagtgtctccactgttagcggcagcaacccatatccctgcggtagcctcgcctaccgacgctctcagggtaaaaccgtcggcagaccatgtcaactccgtagtgtcgcgcccaaactacgccgggccatatcctgcctcgccggcggggcaggatcggatggatgtcaggcgagcaggctttcggctgtggcttggtcggtggtgagggcggaaatatagctgccgaccaggcaggccttgatggccttgactttttcctgcccccatgccacgccgatgaccagcgcgatgcgcttcaggcgatcgagctccaccgaaatgatgcggtcggacagctccgaacatacgggccttccctgcgcgtcgatgaagtgcccgcatacggtggcgaccgcgccctgcgcccggatttccttgaccatgtgtggtgtgacataggcgtcgaacaccgggctgaggcggtcgccttcggtcgcaccgaccccttccagggccacgtcggcgccgccgccgagcgccagcgcggtggcgatttgcggctcctggcgcatggccgcggcgatatgggcggaggagaggatcatcggtacgtggagtgtggtgacggtgccgccgaggcgttcggcgagcatgcggcagatgtcgggtgaatccgtcatcggattgctgggggagagggagcccaccatctgcgccacattggatttcggccagtcctggatggcgacttcgcggaccgtggcggcgacggcccgtccgttggagacggtgatgagcgagtcgggcgacgacttttcggtaagcagggccgcggcatatcgggggacgatggtgctgggatcctgcccgggattgacctgcgccactcgtgcgcatttcaacccgtaccgtcttaccagcgcgtcctccagctgcatcagacgttcgagtggatgcccgatctcgatgcgtaccatgccccggtcgcgcgattcgctgagcagccgcgagatggtggggcgggagtatccaatctgcgcggcaatctgcgcctgcgtcagattgtccgtgtaatacatgcgagcgattttcagcacgagctcgatgtggtttcgcgactcagttgtcgtcattgtcagcttgtttgcaaccatggcattattctattccatccggtgtggccggtgaacatatgttagtttttctagtgcagcaacgatgctgaacaattgttcagagcgcgaaagaactcaatgaatccttgatatgtgagcgctctcaatcgattgcaaaaaagaaggtcgattacatgtgctcactcagttctcatgtgttcgatgaacatgtgttcatcgcgtgggtggtgtgcaagacctttccgccgttagctagaggctgtcgacgcgcagggctcatcgaagaccgacgccgacggaaagtgcggggcaacaacgcagagcagcgggcgaagcagcctgcctcgtgcacgggaaaggaacattatggaaatcatcaacaccatcatcggcctgggcgcctcggtgatgatgccgatcatcttcttcgtggtcggactcatcttccgcatgggaatcggcaaatcctttaaggccggcatgaccgtcggcgtcggcttcgtcggcgtcaatatggtcatcaacctgctgcttgacaacctcggccccgcctcgaaggcgatggtcaaccgcctcggcctgcacctgactacggttgacgtgggctggcccaccgcctcgacggtcggctggggcacgccgatcatggtcgccacggtcgtcggcttcctcgtcatcaacgccatcatggtgttctgcaagctcaccaagaccatcgacgtcgacatcttcaactactggatcttcctgcaagtcggagcgctggtctatgccgtcaccggcaacttctggttcgccgtcatcttcacctgggtcatcttcgccatcgtgctgaaggtcgctgacctcaccgcgccttacatccagaaggaatacaacctcgaaggcatctcgttcccgcaccttgccggtctggcctggtcgccgctcgccatcgccgtcaactggatcatcgacaagatccccggccttaagaacgtcgacttcaacgccgacaagatccgcaagcgcttcggcgccatcggtgagcccgtggtcatcggtttcatcctcggtctgctcatcggcgtgctcgccggctacagccctgacaagtccgtgacgctcgccatcaacatcgccgcggccatggtgctgctgcccaagatgatcgacgtgctgatcgaaggcctgatttccgtgcgtgacgccgccgagaagcagctcaagatctggttccccaaccgcgagttctacatcggcatggataccgcgctgctcatcggcgactcctcggtgctcgccaccggtctgctgctcatcccgatcaccattctgctcgccttcatcctgcccggcaacgagatgctcccgttcgccgacctcgcgtcgctcgtgttcatcctcgcgctggtcaccccgttcgtgcgccgcaacatgttcaagatgctgatcgtcggcacgttgagcgtcatcatcatcctctacgtcggcaccgatatcgcgccctgggtcactcaatcgttcacgcagagcaacatcgacctgcccaaggacttcaccgccgtcaccaacatgaccggcgcagtgagcacatggattggctgggtcgccgtcaagatcggcgaactgttcaacatgatcgcctgagcggctgcgatatcatcggcacatattcaataaggaatcatcatgacaaacgcaacgaagcatttcctcaccattgacaatggcggaaccaacaccaaggtcatcatcgtcgaccaggatggccggcaactgtccgtctcgtcgttcccgaccgacgccatcgagcggcgtcccggcttccgcgaagtcaaccccggccagatgtggcgtgacatcggcaaggcggtcaaggccgcgctggaatccgccggactggatggaagccagatcgacggcgtcgtaccggtcggccacggcaaggggctgtacgtgctcggcaaggacggcaagccgttcatggacggcatcctctcctccgacagccgcgccgcggacctggccaacgaattcgagagccgcgtcgccgaaatctacccgatcagtcaccagcacgtcatggtcatgcagttcccggtactgctgcgctggctgaaggacaacgagccggaacagtacgcgcggatcgggcatgtgctgtccaacaaggacttcatccggtacttcctgaccggcgagatcctcgaggagcgtggcgacgcctccggcaacaatctggtcaacctcgaaaccggtgaatatgacggccggctgttcgacttcttcggcatcccggaaatgctggaatgcatgccgaagctcgtcagcgcgaccgaccgctgcggatccatcaccgccgaagcggcggcgaacaccggcctcgccgaaggcactcccgtgtatgccggactgttcgacatcgacgcctgcgcgctcgccaccggcgtgctgagcgacgatatcttcagcatcaccgctggaacgtggaacatcaacgtgttccccagcaagaccatggcgccgctcgacggcggctgcatgaactccgtgttccccaccggtggcaccttggtcgaggcgtccagcccgacctccgccggcaacctcgactacgtgttgcgcatgatgacggcagacggctccaaagccgccagctacgacgaactcggagcgatgctggaacgtaccgacgccaagtacaccgacgtgctgttcttcccgttcctctacggcagcaacgtgaacctgggtgcggaaggcgcgttcatcggactgcgcagctccagcgagcgcgaccagctgttgcgggccgtgtacgagggcgtggtattcgcccaccgccaccatgtcgagcagctgctgcgcgtgctcgggcacaagccgaaggccatccgcatctccggtggcgtatgcaattctgatccttgggtgcagatgttcgccgacgtgctcaacctgccggtcgagaccgtggccgtaaccgaactgggcggtcttggcggtgccatgtgcgcggcggtcggatcaggcctgtacgggtcgttccaggaggcgttcgacaacatgtcgaagctcgccaagcggttcgagccgcacgcggaccagaccgcggtgtatgaccgcaagttcgaggcgtatgaggcgctgctgaccgcactcgacggcggatgggccgcgctgcgtgacatgcagaactcgctggagcgctgacatggtcaccaacgcgctgggaatatatgaaaaggcactgccgcgcggcctgagctgggagcagacgttcgatctggtgcatgagctgggatacaacttccttgaattctcggtcgacgaaagcgacgagcgactggcccgtcttgactggaccgagcatgaccgggcacggttccgcgacgccatgtggcacacccacagccgcatcaacaccatgatgctctccggtcacaggcggtttccgctcgggtcaaaagaccccgaggtgcgcgagaaggcgctcgacatgatgcgcaaggcgatcgacctcgccgtcgatctgggcatccgcaacatccagctcgccggatacgacgtgtattacgagccgaaaaccctgctgtctcgcgaatatttcgtcgagaacctgcgcaaatgcgtcgacatggccgcgaagaaactggtgatgctctccatcgagacgatggacgacccgttcatcaactcgctggacaaggtcacctattacaagtcgcaagtgcgcagtccatggctgcaggcgtacccggatgtgggcaacctcacggcttggcccaccaacgatgtggggcgcgagatcgaatccaacatcgacaacatcgtcgccgtgcacctcaaggacaccaagccggtgggcgagacctcgaaaggcgtgttcaaacgggtgcccttcggtgaggggacggtcgacttcgaagcgtgcctgcgtatcttcaaacgactgggataccagggcagctacacggtcgagatgtggaccgatgagtcgccggatccggtggccgaggtgactcgggccaaaaagatgttcgacgggctgttcgacgtggtgggcatcgaacaggagccgatcgccggcatcggagaatactgagcccgctcgtgggtgcggcgcggcgcgccggcaccgcctttgatgaacgtcccgatatataagtgcgaataagaaaagtgagtggtgattatggtttcgttggctgattttggtcctgaggttcgtgctgaggtcaagcaggtgcgtgaggtcgtggcggccttgcatcagcagctgatcaagtggaacctggtggtgtggacggcgggtaatgtgtcgcagcgtctgcattcggcggatctgatggtgatcaagccgtcgggtctgcgctacgagtacctgacgccgtcgagcatggtggtgtgcgatctggacggaaacgtggtggatggtgcggaggtgccttcgtcggatacggcgtcgcacgcgtacatctaccgcaacatgccggacgtgtacggcgtggtgcacacgcattcgacgtacgcgacggcgtgggcggcgacgggtcagaacatcccgtgcggcctgacgatgatgggtgacgagttcggcggcccggtgccggtgggcccgttccgtctgatcggctcggaggcgatcggcaagggcgtggtggagaccctgaagaagtatccgaagtcgcaggcggtgctgatgcagaaccacggtccgttcacgatcggcaaggatgcggaggccgcggtgaaggccgcggcgatgacggaggaggtggctcatacgatgtgggccgcccgtcagctgggtgacatcatcgagattccgcaggcggacatcgacaagctgaacgaccgttaccagaacgtgtacggccagcactgacgacggggcacatgaggggattgtgatttggtttcgactgcgagcgaggtatgggggtctgtgcttgtgacatgcccggagtgcgtagcacaatcgtcgcggttcaatatcgcgattggctttatcgcaccattcacatggcgatacccaacaattgtgctgcacactccgggcgtgtcggctcgttccggcggctgaacgggaggctcccgttacggagcccggccgaagttgaggtcaattccgtctcgtccatatgaatcaataaaatgtcgttttgctgtgtcgagggtcggccgccgcataagccgcctcttcatgagtccagaccgaacgggcgcaaagccgctgtttcggcggattgacaggcttcctgagggcagacccgagggagttacagacgtgttcgtgatgccagtcatcaccgaaccccaaaccagtgcgctgatatgcggcagcgactaaggaatagcaatggttaacgctgttgaggcatttgacgccaagcacatgaagcccgccgaggagatcccggcgttccgtcccggcgacaccgtcgacgtcaacgtcaagatcaaggaaggcaacaactcccgtatccagaccttcaccggtgtggtgatcgctcgtcagggctccggcctgcgcgagaccttcctggtccgcaagatcagcttcggcaccggcgtggagcgtcgcttcccgctgcactccccgtccatcgactccatcaagctggtgcgcaagggccgcgtgcgtcgcgcgaagctgtactacctgcgcaagctgcgcggcaaggcggctcgcatcgtcgagcgtcgcgacaactccgccaaggcgactcaggcctgagttttgccaagtgaggcgacagtaccgtgaaattcagcccggagccgattggttccgggctgaatttataggaacgccgctagtatagttggggtttcatgtatgcgtgatggaggaactatgcggccagacgaccatcggacggatcgggccatgcccggttccggcaccgaattcagccgggacgaatggatcgtcgccatagccgatcatggcgtggaccccaccgatatgccggggcgtgtagtgggcaccgacggccgagactcgttggtccgccgcaggaaaggcgcccatcgcaagacctcgcctaagcacaacaatgattcgttctcgttccgcgacctgctgatctggtgcgtcgtccccttcgtggcggtactgctggtacgcatcttcctgatcggcttttacgtgattccgtccggatcgatgcgcgataccatcgagatcggcgaccgggtcatcacgtcgaagctcacgccgaaatatttcgatctcaaacgcggcgatatcgtcgtgttccacgaccccgcgaactggctgaaccaggagaccaccagaggcaaaggcgattatctcatcaaacgcctgatcggcttgccgggcgacgtggtcgagtgcggcggtgccgggcagccggtcaagatcaacggcgtcgcgattgacgagacgtcatacatcaaatccggcgtcgacccgagcagtttctcgttccgcgtcgaggtgaccgccgggcatattttcgtcatgggggataaccgcgccagctcagccgactcccgataccatcaggacgacggtgatcatggcttggtgcccatcgacaatgtggtcggagtgggactgatgcggtattggccgctgaaccggatgagtttcctgagctcccatcatgatgtgttcaaggacgtgcccgccggcaaggcgcagtgacatcagacggatggtgatatggcgatgatcgaacatccgacgcttgatatggagcggcagcttgccgcccaaggctgcgatgtggtgatcggctgcgatgaggtcgggcgcggggcgctggccggtccggtcatggtcggggcggccgccatgtggtcacgtgacctcgccgccgcgcaagtgccggccggtgtcgccgattccaaattgctgaccgagcacaggcgcgaaggaatcgtcgacgagttgcgttcgtggtgcgccgcttacgcggtaggtcaggcgagtaacgccgaaatcgacgagtggggcatatcgcatgcgttgggcatcgccgccttgcgggcgctcaacgatgtggagcggcagctcggcatggacgggccggccggttcgggtcgtcgcgtggacgtcatcctggacggtccgaacgattacatcaccaagacgatgaacacgtttgacgcgccggcgttgccgattccggtacaggtgtcgtgcaaggtcaagggcgaccgtcattgtgcgaccgtctcctgcgcggcggtcatcgcgaaggtgacgagggaccacctgatggttgacatcgcgcagggcaatccgcggtacgcgccgtacggctgggcgcacaacaagggatacggttcggcggctcaccgcgacgccatcgcccgtctgggagtcacgccgctgcatcgggtcacgtggcatctgacctgattgcggcgttgcggctgattccggtcctgcgccgcgcggctcggcatggcgcggcttaatttggctcggcccggttacctgactcggtgctttgtctcaggtgcgggcgctgtagtgccacagttctttgtgagaagaagtccggggcgtgaatccgaacagcgcagtggcgaatctgttgcctgcgcatgatttgtgagcgctcacgtgtgttatttaagcgttaccgggtagacttgcccatattgtgttgttatgcagcgggaggtttgacagcgtgacggccaagcgaagcgggcggaaacgcccatccatgttcgaagtcgcgaagctcgccggagtcagtcatcagacggtgtcccgggtcatcaacgattctcccgatgtctccgacgccacccgcaccaaagtgcaggatgccatcaaggcgctcgattatcgtcccagcaactcggcgcgagcgctcgcatcgcaccgttcccgcacgatcggcctgatcgcaggcggcatgaagttctacggccctatttcggcgatttccgcgatcgagatgatggcgcgcaagcacggcctgttcatgtcggtgatgatggtgcatgaggcgctgtgcacgcgggcggagttcgagaatctgtgcggcacgttcaacgagcagaacgtcgacgcgttcatcatgctcacgcccaccgatgtcatgttcgaagcggcctgctacacgcagctgacgcagcctcgcgtgatgatcacctccacgcacggcgaactcagcgtgagcgaagggctgcgcctgattcactcgcgcgagcgcgaccgcgtgtcgatcgtcggtatcgaccagtggggtgcgatggacgatgtggtgcgcatgctgaccgaatacggtcacaagcgggcgttgtacttcgccggtccgttggggtggcgcggtgcgatgacgcgactggatgcctgggtgaaactgacccgcgcccgctccatcagttccgtcacggtgcgttgcaagacctgggagtcgaccgaggcgtacgccaggatgaaccatattctcgattccatcggcaatcagggcggcaagttgccgacggtcgtggtcacggcgaacgacaatcaggcggtgggcgtcgcgcgtgccctgtatgagcatggtgttcgcattccacgtgacgtcagtctggtcgggttcgatgacatgccggcgatggacaacatgattccgcctctgaccacggttcggcctgattttgaggcggtgggcgtcgctgcgatgcggcaggtgctgcatctgctgggggaaggtgacgaagtggcgttgcccgcgtccgcacatggtgtcggtctgctccccgcagaagtcgtgaagcgttcgtcgctcggccctgccgccaaccgctgaccgaggatcgcgcgtttttcttgggtctgttagaccaacgtgttggttttgatttgtaaagtagctacatggtacgtgcaatgaagctatgggtaggcgtagcgaggcagtgaaactggtcggcggagtccggggcggactcgcgctgctggatgatgacgagcgtcgtcgggtgattgaggcgggcgaacgagatattgacgacggcgtcggcttttttttcgcggcacggctcggcctggcacggcgttgatggtcgcgtacgtcgacgagttcagggaccgtttcagggccgggatcggccgcggccgggtgacgagcgtcgtgcgggaaccgggaatccgcggcgtgcgccgcggcgggacgcccgtcaccgccagatcggcgaggggcgcgggcgcgggcccggcctcgcggaacgcgggttcgaggcgggggcgccgaaccggccacaccggtcctcgggctgcaggacaccggaacggaccgaaaccgggtattacgcgaaccaagcggcgcaagctgcctcactataagagcggaacaaaaaacaggccatatcaatgtgccagacggcacgttcgcaccacccctcgttcggttatgcggcccggtggtcagcgcttgccggcgtacagctcctggtcgatcgcgtcggagaacacgcggttcacagccggacgcacgaccttcagcgacggcgtcaggcaggagttctcctgggtgaactgcgtatccagcaccacgaacttgcgcaccgattcggcccgcgagaccgtcgcgttcgcgcggtcgacgaacggctggatctcctcgcgcacctgcgggagcgcggccgcgtcggccagcgacaagtcggccggctgaccgatggtcggcagccacgacgccagaccttccgggtcaagcgtcaccaaggcgccgatgaacggacgcccgtcacccacgaccacggcgtgctcgacgatcgggcacttggcgatctcctcctccatcgggatgggggagacgttcttgcctccggcggtgatgatgatgtccttcttgcggccggttatcataagccggccgtcctcgtcgagcgagccgaggtcgccggtcttgagccagccgtcggcggtgaacgtttcggcggtcttctcggggagattgtgatagccgcggaacacgttcgcgccgcgcacctgcacctcgccgtcgtccgcgatgcgcaccgacgagccgggggcgggctggccgaccgtgccgatcttgttgtcgttcacgcgtgtcaccgtaaacggcgccgcggtctccgtcataccgtatccctggatcatcggcaggccgatgccggcgaagaagtgcgccagatcggcgctcagcggagccccgccgcacgccacataccggatgttcgggccgagtgcgccgcgaaccgcgcggtacaccgatgtctcgaacatcgcgtgccgggcgcgctggctggcggaatgcttgcctccgtcctgctcggtgcgcgaccattcgcgggcgcactgggcggcctgcgcgaatatgcgccccttgaaaccggtgccggccttgcgtgacgcggcgttgtacaccttctcgaacacgcgcggcacgccgagcagataggtcggcttgaatgagcgcaggtcgggaagcagcgacttcgtatccggcagatagccgaccacgccatcgtcggagccaatcgagcagtactggatgaaccgtgcgaagcagtgggcgaggggcaggaacagcagcagccgtggatggttgtcgcacagcacctcgccgaggcactcgtatccggctcgaaccaccgacaggaaattgcggtgcgtgagctccacgcctttcggggcgccggtcgagccggacgtatacacgatagtggcgaggtcgtcggcatgggtgtcggcgatgcgcgcctccagctcctcgtcggagaccgacacgcccaatccctccaaagcgcccagcgcgttgccgtccatcatgaggatgcgctgcaggccggggcatcggtcgttgatcgaatcgagacggtcatagcgttcgcggttatcggtgacggcgagcttcacgccggagtcgttgatgatgcgctccgcctgtgccgcggaatcggtgtcgtagaccggcacgttcaccgcgccgatcgcggcgagcgcgaaatccagcacgccccactcgaagcgggtggcggagaacagcgtcaccgcgtctcccttgccgacgccgaacgcgatgaggcccttcgctgcggcgagcaccagacggtggaactcgccggtggtgatgctcgaccacgcgcccgggccggtcttgcgcgccgcgatggtggtcgcattgccggtgcggtcgatgcgttcggtgagtagcgagtacagtgtctcgtcgtcgttcacggtgacgtcgccgggggaggtgtattcgctgatgatggtcggaatggcagcggtgccgaccggccgcgcggccggtgccgtcatgctgggtgccggttcatccgccggcttggcggcttgggccgcgttcgactgatcctgtgcctgatcctgtggcatcgtggatttcctttgcagatgtcctgatacgtattccatcgtcaagggtacgttgccgtaggttcctgcggtgttgtgcatggacacgaaaagcggcgtcgggttttgtcgtcgcgcacaaccgcgcggcgcaggccggcggcggcgcggtggcggacgtcgggcggacggtgttcccgcgcggcggtgcagcatggccggctgataacggattataggttttccttatcgccggaaatgagccgctgcgcgtgttcgcggcgggaacgcctctagcatggtgccttgtgtgccgccggcgcatcccgtggatgtgcgggcggtcgaggcaacgacaacaatggcaatatagacaatacagtagcggcaacaatgacggcgatggcggcagtcgtcgcggcggccatcgccgcagcatatggaaggagaaccctcaatggctgaaaaccgagcggaactgaacaagaacctggcgcagatgctcaagggcggcgtgatcatggacgtgacgactcccgagcaggctcgggtcgccgaggacgccggcgcgtgcgcggtcatggcgttggagcgcatccccgctgatatccgtgccgccggcggcgtctcgcgtatgagcgacccggccatgatcaagggcattcaggaggccgtctccattccggtcatggcgaaggtgcgcatcgggcacatcgctgaagcccgcatcctgcaggccatcgacatcgactacatcgacgagtccgaagtgctttcgccggccgatgacgtctatcacatcgacaagacacagttcgacgtgccgttcgtgtgcggtgcgaagaacctgggtgaggcgctgcgccgcatcgccgagggggccgcgatgattcgcaccaagggcgagcccggcaccggtgacgtgatccaggccgtgcgtcacatgcgcacgatgaacaagcagattcgcgagctcgtcggcctgcgtgacgacgaggtgttcgaggccgccaagcagctggccgtgccggtcgagctggcgcgttacgtgcacgacaacggccgactgccggtcgtgaacttcgccgccggtggcgtggccaccccggccgacgcggcgctgatgatggagctcggtgccgaaggcgtgttcgtcggttccggcatcttcaagtccggcgacccggccaagcgcgccgccgccatcgtcaaggccaccgccaactggcaggacgccgatctgctggcacgactctccgagaacctcggcgaggccatggtcggcatcaacgaggacgaaatccagaccatcatggccgcccgcggcgagtgatcatagcccgctagcggcgggacgatcgagccgcccctcccgctggcgaaggcggtcaacttggcgggggtgattccgcatgaattcgcccccgctggcggcgagggctgtcgcggggcgactggggtggtagaggcgcatcctcagccccacccctccccaccgcattcgacggctcccctcatcgggagccaaggagtaatcatggttgtagctgttgaatatatttcgaaggaagcgtcggccgatgccgagacggcaaagcacggcgtgaccggcatcctggccgtacagggcgcgttcgcagagcacgctgcgatgctcgacaagctcggcgcccagtggaagctgctgcgtgccgccgaggatttcgacgattccatcgaccgcgtgattctgcccggcggcgagtcgaccacacagggcaagctgctgcgctccaccggtctgttcgagccgatcgccgcgcacatcgccgccggcaagccggtgttcggcacgtgcgccggaatgattctgctcgcgaagcgactggaaaacgacgacaacgtgtacttcggcgccctcgacgccacggttcgccgcaatgcttacggtcggcagctcggttcgttcgcctccacggccgatttcggtgacatcaaggactttccgctcgtgttcatccgtgggccgttcgtctccgatgtcggggcggacgccacgatcgagaccgaggttgatgggcgtgtggtcggtctgcgacagggcaacattctcgccacggccttccaccccgaactcaccgacgacacccgcattcacgagttatttttgagcctgtaggctcccgctagcggatcgggctgcttgtcggcggggaacggcagtgagaccagcgggctggtcatgcatggcatgtccgtaactgcagggtcgagggctgttcgcgaaggtgactggggcggccgaggactttcggggtatcatccgcagctcggcgtctcgatttttggccgagacagcaggtcgccgcgtcccttcgtttcgtagttgtgccacaccagcgtgattttgcccgatttggccgtggtgtggccacgccgatggccacaccagctcgtgcaaacgtttacatgacctggtgtggtacatgatgtcattagttttccttgaaatatcaaggaaaacgggattcgactccaaaccggtatcgggcgcgtgtaccacagaaggccgaaaagaggcaaaaaagccctggtgtggtacaggctttgcgatgtcgtgtgcgtcgtatgacccacaaatcgccggatggtgccatctgtcgacacgataagcttatatcaacgttgtcatgccatatcgttcgtcgcttacttgcctgattccttcctcaagtgctgagcaagagacatcgccggaccatgcattatccggcgaaagtcccatttcggcgcttccgaatgggtctttagcggagtgaaagatgcggacggtggatcgggggttcgacttctacttcaaccgcgcgaagaacgaggctgtcgtgcgcgagccggcaggcgagaccctgctcgtctaccgcggatgcggcaatgccgatgatgtcagggccgtcacgctgaaacgcaacggtgtgctcatcacggtgtcgcaacgttgacggatcgccggctccagacatggggccggcgattcgaggagagtcgggccgcggcgaagtccgcgacgacgtcgacgtggacttcgtcgcaatgctgctgcgcggggagacgcgggttcatgacggtgaccgggcttccggcgcggaagcagcgccggccgcagggccacgggccgattaccggctacggctgacgctggaccaatggacgccggacggtgcggtcagcggcgaaatcactgacatcactcggctgcgactgcggttccgcagcgattacggaaccgtgacggccctcgacggatccgccgtaccgcagacccaggatctgttccgtccgctcctgctcgcggtgcaccgcgatgacgggtcgggcattgccggctcgactgccgatacctcgcgcgtggtcatctccgtcgtcgcggaacgactcgacgcccccgtgcgcatccccgacacgcctgacgcgaccggcaggcggggcatgcgtttcttcgccgcccctgaactcgcatacgaacgcgggacgttctacctgttcgccaccgccgacggacacggcgagtggagcggctggcagatccactgcctcgcctccgaagacctgacgcattggcaggaccgcggtgtcgtcatcgacctgcatgaccagcatctcgacggcagcggccgaaccaacatcctgcccggccacgcctgggtgccggcgctcgccgttcgcgacggccgctattacctgtatttctgcggcgacgggcagaccaacgtggcggtatccgaccatatcgatggaggatacgctctgcagggcgacttggcgcgaaccggctcgcacgccgcgcggcacggcttcggaaccggcatcgtcgcgcccggcatcgatcccgcggcgttccgcgacccgcaggccggccgatgatacctagcctgggggcagaaccgggcgcgctactcccgcctgtccgacgacatgctgcacatcatccccgaagccacgcccgacatccggaaggccgcatatctgaacgtgagagagcatgccggaacgtggacgtactatctcacgtactcgatcggcgacatcaacgaccccgactatcgagtcgcctatgcggccgcgtcgaccatggaaggcgacggttcgcagtggacctatcgcggcgaaatcctggtcgccaacgaacgcctcggcatactcggcaccgggcatcactgcatacttcaggtccccggcatcgacgaacgggtcatcgcctaccactgctttctgccggacgccatgcgcccgcgcggcgtggaccggtacgcgggcgagcgcatccgcaccggcaacaagcgcgaaatccggtccgccagactcgaattcgacgaacggtacggatggcgtgccgctcatcagaccggtgacggtatcgatgagcagcctggcgtggtcatgaacagcggcgacatgcgtggtggcgaacacgtcatcggatggcaacgatgtcgcgaagacgacaaaaccgtagcagacatgcggtaaggaggcccgtatgacaacttcggcgaagacgattaccatagggggagtttcctctacgagtaaggttgacgcgatgggcaagaccgaaaacggcaagaccggcaagagcgagatcgcgcagaacctgccaggctcgccgacgacggccgcacgtcggcgcgtcacgttgcgcgacgtcgccaccgcggccggcgtgtcgctgaaaacggcatccaatgtcatcaacggcaccggacgcatgaccgacgccacccgcgccaaagtcgaagccgtcatcgagcagaccggataccgggtcaacgtcgccgcgcgcaacctcaaccgggaccgcaccggcttcatcacgctcgctgtgccgacgctgaccgcgccgtacctgtccgagctcgcgaaccgcgtgatcgacgccgcccggcagcgcgggtatctcgtgtacgtcaccacatacgcggaagggtcggcgacgggcgcccgcgagttgttgcgcaacttcaacaccacggtgtcggacggcatgattctgtcgatgagcgaagtcgaggacatcaacccggaggacctggaggtcgatttcccgctggtggtggtcggcgcgcgaaccacgtggggcaaggccgatcatgcgacgcccaacgacgtgcaggcggcggcatcggccgccggatacatgttcgactgcggcgtgaagtcgctggcggtggtcggcggacgtggcgcatatgacgaggcgaagctgctcggcgcggtggaaggcaacgcgcagctgcgtttgcgcggcatcatcgaagaatgccggcgacgcggcatgacgctggatgcgcggctggtcggcaatgtcgagcaggaatggacgattggcgcgggcgcccatgccacgcaggagctcatcgacaagggcgtgccgttcgatggcgtcatcggcctgaacgaccagctggccatcggcgcgttgaccgtgatgcgcgcgaacggcatcgagattccccggcaggttcaggtgatcgggttcgacaacatcgaggagtcgcaatacctgcagattccgctcaccaccatggattcgcgtctggagtggaccgcgcctaccgccgtcgagcggattctagggcgcatccgcggtgagatcgctaagcccgagttgttgatgaccgattgcaatgtgattgtgcgcgacagcacgcggtgaatctcggggattacgggaaccacgctctcaaaactcgcagatacaggccatttttagtgaatttgaccctgtgagttttgagagcgtataacgccgcgtttccctatttgaggtcggtggcggcatgtgctccgtcccgcgaaagtcccgtttcactggccttggatgggacttttgccggatgggggggggcgctgacaatcgacataatggcggcctggtgggcgttggcgggggttgtcggtcggaggccggctggggtggtcgagggatgcttcggccatgggtcttgcgtagaaccgtggtgcgcgtcgggtctgatttgtcgcgacacgcccggagtggtggcacaattgcgaggctggttattgcggatcggaggaattgagcggttcgtcacgactgcatatgacggttgtgctgcgcactccgggcgtgtcgcagctgatggcggcggcgtcgttgacgggctggtgaccggatggccgctatgacggctgatcgatcggtgcaggggccggcggcgttgtctgccggcccctgcaccgatgccgccaatcgcgaatcgtatgtcggtcatccgatatgatggcatactggtgtagggaggctcggcatatcgccatggcatatgctccgaaccggatgtagtgtgaagacaaggagacgaccatgctgggaaccagcgatctcgccgttgcggcggctgctgcgagcgtgccgggaatcaaactcaatgacggcaacgtgattccgcaaatcgggttggggctgctgcgaatcgagaacgatgatgtcgctcccgtggtcaaatcggcgttggcggcggggtaccggcatatcgacggagccgcgggctacaacaacgagggcggcgtcggccgcgccctcgccgaaaccggcttcaacaaggggcgcaagcgcagtcatctgtgggtcacgaccaagctgcgcgactccgagcaggggtacgacatggcacttgcagccttcgaccgacagctgggactgttgcagctggaatacgtcgacatgtacatgattcattggccgactccgttcaattggcgttccggagcgacctggaaggcgttcaccaagctgcgcgacgaaggccgtgtgaagacgctgggcgtgtgcaacttcctgccggagcatctgacccgtctgtacgaggagaccggcgaatggccggcggtcaaccagatcgagctgcacccgacctggcagcagcgcgaagtcgtcgcattctgcaaggagcacggcatcgcggtcgaagcatactccccgatggctcgcggcgccgacctgaaggccggcaacggcacgatcgcgcgaatcgccgaggcgcacgaggtgtcgcctgcccaggtgatcctgcgctggcacatcgaaaacggcacgatcatcatccccaagtcggtgcactccgaacgtcagcggcagaacctcgacctgttcggcttcgcgctcacgctcgatgaacatgccgccatcgacgcgctcgacggtccggaacgcgcggggcacgaccctcgcacgttctcctacgcctgatccggcggggagaaaggtacgcggcgtgagtccgggcttatgccgcgcgcctgagccgacgacgataccgccgcgcagcccacgagactgaccgcagaaccaacgacaggccgattgaccgtgcgcacgcattttcgcaaacgccgattccgcggatcatccccgctggaacgtcttatgatactggtggcgatcgccgccctgctcggcgtcgtcatcggtctggcgttgcccaaaatcagcccctccatcggcgagatcaccggcgaatacattgcctccggcccggcggcggacgcgctgaacgggctgcaggtcgacgaccggcccgactccaccggctacgaccgcgactccttcggattccgcgccaccgacgatgatggcgacggctgcgacgtgcgcgacgatgtgctcgcccgcgacctgactgatgtcatattcagcgcagccaagcgctgccaagtctcctcgggtacgctcgccgacccctacaccgggaagaccatcctgttcgtgcgcggccgaaacaccagcgccgccgtgcagatcgaccacgtcgtggcgctcgcaaacgcctggcaatccggtgccagggactggaccaccgcccagcgctaccgcttcggcaatgacccttacaatctgctcgccgtggatggccccgccaaccaggacaagggatccgcctccgccgcttactggcttcccaccaacggcgagtatcgttgcgaatacgtcgcgcggcagatcggcgtcaaacggcattacggtctgaccgtcaccaccagcgagaaacgttcgatgctcgccgtgctgcgcgcatgccccgcgcaacagatccccagtcagtgaggggcggaatagagcccatcgctcgacaaatgccgcagtccgcccagcgggggagtcgtgtggcgggaaattcgacggtctgttacaaacgcggtgtataccattaggcgaatcgagtagcgcccaggggtcgggcgcatgagaggaatgagggaatgaaagagcatcgtcagatgatcgatgacaaaaccgattcagagatcgacatcgaacgcagccatgccgaggaagcgtccgggagctatcatcacgagcatgcgctcgccagcatcttgggaccggcgttcgtggccgcggtcgcctatgtcgatccgggtaatgtggcggcgaacatcacgtccggcgcacgatacggctacctgctggtatgggtgctggtgctggcgaacgcgatgagcgtgctgattcaataccagtcggcgaagctcggcatcgtcaccggcaagagcctgccggaactgctgggggagcgtatgggcaacgcgggacggttcatgtttttcatgcaggcggaggtcatcgccatcgccacggatctggccgaggtgatcggcggcgctatcgcccttaatctgctgtttggcttgccgctgttcgttggcggcctggtgatcggcgcggcctccacggtgatgctgtggttccagggcggcaggacgcagaccacgttcgaacggatcatcatcgtgatgctgctggtcatcaccttcgggttcatcgcgggcctgttcgtggccccgccggatcccgcagcggtggtgcggggcctgatcccacgcttccaaggcaccgattcggtgctgatggccgcctcgattctgggcgccaccgtgatgccgcatgccatctacctgcattccacgttggtcaacgaccattactacgcgcacggcgataagccgtcgattgccatgcagctcaaaggttcgaagatcgatgtgacgtgggcgctgctgctggccggcacggtgaatctggcgatgctggtgcttgccgcgaactcgttgcacggcatgtccggcacggattccatcgacggcgcgcaacgggcgatcacgcaggtgcttggcccggtgatcggcacgatattctccatcggcctgctggcctcgtcgttgagttccacgtcggtcggcacgtatgccggttccgagatcatgcgtggtcttctgcatgtcaacgtcccgatgtgggcgtgccgcgtggtcacgctggtgcccgcgctgatcgtgctgtggttcgccaaagaccccactcaggcgctggtcatcggccaggtggtgctgtccatcggcattccgttcgccgtgattccgctgatgcgttatacgcacaccaaggagcttatgggcgaatgggtcgacgggacggtcaaacacgtgatcttcatgatcgtggtggcgttgatcgtggcgctgaacgtgctgctgatcgtgcttacgattttcgggcgtgcgtgacgtggacgactgacgccgagactcgccgatttcccgcggattccgctccgagatgcgggattagggatggcatatgacgaaagcgttcctaagtgcgcgccgaaacgacgaccgtgcgcacttagcgacgcaaaccgggccatttgcgtccctaagtgcgcggacttgtcatttcggcgcgcacttagagacgctttcgcgctctgatggctctggatcgttcggagccgtgatgtctggcaattggattccggttaccggtgacgttcctacgcaaattggcgactattgtcatcgtccggtgacaatagtcgccaatttgctgcgattaccggtgcgagaccgtgcggattctcgcgatggcccgctgcgccacgtcccgcgaggatccggcaccggctcctttgacgccgaacagcacgatgagcacctgtatgaacacgatgaacgcgctgactcgcagcgtccactgcgtgccgaagatgctcgcggcgattgcgtcgcctccatgcagttgaatcagcgtctccatcaggatgaccagcacgggggctccgatcgcacccgcgatctgccggaccgtgttggtgaccgccgacccggctgacacctccgtcgggtcgaggcagttgagcgaccaagtggtgatgggcatgatgatgaaacccatgccgatctggcgcacgaactgccatatcgatacccaccagatccacgtgttgctgtcgatcagactcatcatgatggtgccgaacagcagcaccagcgtgccactgagcgccaccggcctcgccccgagccggtcgagcagcttgccgccgaagaactgcgagatgcacatgccgaatgcgccgggcatcatgaccagtccgctgatagtcgccgaatagccgcggtcgttctggatatacagcggcatgatcaccatgatcgaactgaatgcgaagaagctgagcgcggcgcagatcgtcccgacggtgaaactgcggttgcgcagcacgccgaggtcgagcagcggcggttcgggagtggtgcgttgcgcggtgtccgactcgtccacggattgccggacggccaccgtatacgccttcgcgcggcgcacctgccgcaccacgaaccacacgatgccgcacagtccgacaagcatcgcgccccacaccatcggattcgacggcgcgtacgattcgatgtttgtgaacccgaacatcaggccgccgaagccgagcaccgacatggccacggagaagaaatcggccttggcatggtcgtcggtcgtcccgaagttacgcagcccgaagatggccagcagcaggcagaacacaccgatcatcgtgagcgtgaagaaaatcgaacgccagccgaaactgtcggtctggaagccgccgaaagtcggccccagcgcgggggccacgctcatggccatgccgaccgcgcccatggccatgccacggcgggataacgggtagatcgagaagacggtgatctgcagcaccggccacatcacgcccgtgccgacggcctcaagcagtcggccggccagcaccaccagaaacgtcgggccgacccatgccagcagcgatcccacagcgaacacggtcatcgagacgatgacgatttgccgggtggtgaagcggcgcgtcaggaacgcggtgagcggcaccatcacgcccatgaccagctggaaaatcgacgtgagccattgcccggtggtcacggagatgccgaattccgatacgatggtcggcagcgcggcggacagctgcagctgcgtgaagttgccgacgaacgtgatgaacgtcaagatggcaagcgaagcgagggccacgcgcgaaagatggccgttcacgtagctttcgttgctggagagcggcgtggacagcgtggatacgcgtttaccgccggctgtgccgccgcgctttgcgagggttttcttcgggttcttgccgttcgtgctggtttccgtgctgctgtcgttattgtcgctgtgattggtcattgtgccgtattctcctccgttccgcctcatgcgcctgtgtatgcgtcatccctgtttcgctgcgtagggattgttgtatatgcatcatttctgccgaccaatacacactactcctacaggtgggcaacccgggtggaggcgtggggagaaggttgggggagaagggcgcggaggaaaaatgtagggaaggccacggaggggtgggatggaagaacttggcctgttcgcagtcatctgctctcccatctaggccctcgccgcgcaagcctgcgcccgcggcggaacacgtttgttccaactcgcgggaagactgaataccatcccccgcgaatctcctctaccattataaacttacgcaatgattggacagtttatgcaggtcgcgcggctctcgccagcgaccgtgcgttttgtggcccttccatggcgacaacgcggttgtgatggtgacgcggtgacgatgctcatggcctgtggaagcgatgacatgctaccttgggcgtatcggcgcatgacatggtcaggacggtaccgtatataatggcgtgaacgttgaatatgccggtgaaacggccataatagggaacagaaggccgggcgaatcccggaaagcggacatgaatcgggggcggatgatgaacgagcatgaagcgcatgagcgtgatatgcaatgggacgatgccggcgacggcgcgggactgcccgaaacaggggaacgtgacgctgtgcagggcattgaaccgggcgccgagcggcatgcggccgaatataaggccgtagcgctgggcgatgccgtggctgctgatgccgccggcgccgccacgagtgtcatcggaaatgtcccggttccgactgcggcagaaggcaagacggaacccgcggcacaggagggggccggcgctgccggacagcaggccgcagatgatgagggcatgcagttcctcgacaatcccgcgtgggacatccccgacgtgatgttcccctcgatgggcggcgtcaaggacgcttcatcggggagcggcccatcgtatggtgctcccagtccccacgttcccctgcctgaaccggaggacaccgtgcggccggtgcatgtctctgcctccgatccgctggggctggaggacgtgtccgatatccccgccgtgccggaggaggaagagccgcaaggcaacaacgacgtcactatggtgatacagccgttgagtgctttccctacgcccacgcagagcgtgccacctacagccggaatgacgccgcaggccgtgccactgccgcctgaggcgggcgcggcggtgcctcctcatgggagcggagagccgggcggcaaggcggacggcagttctcgaaagcaacatggccaccgccgcgctatcatcatcgccgtcgtcgcggtcgttgtcgtggcgctcgccgctacgggcggattcctgtggtggcgccacgtgcagaaccagaacgagctcgatcaggcggcgagcctgtgcaagacctcgaagaccaaggccgacaaggcgttttccgaattgcagtccgcgctcagcgaagccaagcctgcgcagcagattccgcaaggcgatgtgtccgatccgactgtcctggagacgctgaacagcgcggtcacaaaggcgtcctcggccagcgagccggtctcgtgcgacgtggcgttgggcaccgagacgctgaacgccaatgccagcaagaacaagcagatcgcgcgcgccagcaccaaggcgaagacgaacgtcgccaaggccaccaaggctgtggacgacggaaaggcggagaaggtcgagtttatcaagcatgaactgcagacggccgtcaccggcgcgcagaagatttacgatgacagcaagggcgttgtgctggacgactcgaccaggaccacgctgcagtccgccatcgatcaggcgaacgcgttgctgcagcaggatgacgccgatctgaacgagatgcagcagtctatcaccgatgtgaaggacgccggagacgcggtgaccgtgtcgatgaacgagtacaccgcccagcagaagtatctggagcagcagcgccagcaggagcagcagcgccagcaacagcaggacgaccagaacgacaatggcgacgacctgaacggcagcacggattcgcagatcggtgattcgcggggtcacgagacccagccgacccacccgcaaggtagcgacgactgatagatggtgattggcggtcggccatcctgtttgaccacccccagtcgcttctcgacagcccctgccagcggggggggggctgtcgagaagcgactgggggtggttcatatagactgcccactcttgtcggctctgccgtgaacggcaggttattttgcgtcgttatgtgcgcgtactcgtcgtttcggcgcgcacataacgacgcaattgcggccgattcgtagttgtcaggccttctcgcattgcgatcggctttataggtgagtcttgcgacaacaaaaaccggcccccgcaggagccggttgaagaaacgatagcgcgcccgccgtcagtagttgctgttggccttccagtaggcataggcgccggtgatggagccgtagcgctggttgcagtagttcacgaaccacttgaactgcgtctggtagttggtgcgccaatccgcacccgcggatgccatcttgttgccggggagcgcctgcggcaggccgtatgcgcccgagctcgggttcgtggcgttcgtctgccagccggactcatgattgatgatgaagttggcggcggtgaagtcggcctcggtgtaaccgttcgccagcagccagtcatgcgcccacttctgcttctcgccggaggggacggtgtcaccgagtgtgttcgcggccgcctcttcggcggaaccggtgccgaccaagatcaccttgtcgacaggggctttcttgacgtacttggcgaagacggtggacgagatgaccttgcccgcggagcgagtgaccatgctggtggtctgcagcacgccttcctgaccttcggtctgcaccttctgctgaccctgcggcaggctggtggtctccttcttgaccgtgttgaacgcgatggcggtctccgaggtctcggcctgcgtgtcggcacgcgagatggagatgaccgtggactcgtccaccttcgtggtcagggccggcgtgacgctgtcttccggctccaacgtgatgttgcccgcgtccagtacggatttgacatcggtgaaattgtcgcccagcacgaagcgggacttgccgttgatcttcaccgtcacatagctggtgttggcgtcggcgccacgcagatccgcacggttgttgcttcgcgagacgctgcttccggcgaggtcggcggccgagtattcgttgaccgtggttccgcggccacgaccgatgtagaagtttcgggagacgatgccggccgcaaccaccatgacgatcgccgcggcgatcgctacgatgcggatccactggcgtttgctcagcgacagcagcgttggtgcattggttttgcgatggctggccattatgctccttgaatgacggacaatcctcggcgaatccggccgtcaatcacgacgggcgggtgatgcgtcgacgctggtgggcgccgcaccggagtacacaccaaatccaagtttagaccactatgacgatcttgtgaaatcttggagccggcggattccgcattccgcccgcgcccgtggcaccttcgcctggccgccggcgtacgaacgcggaatccgccgggaatcgtcggttattcggcggaagcggacgaatcctgcgcggcggcggaaacgtccagcgccttcgcctgcgcgatcaggtcgtcaaggtcttcggcgcgcagcgcgccggcctgcttgaagatgatctggccctgcttcgcgatcatcagcgtgggcactgcctggatgccggccgcgctggccagatcctggttcgcgtcgatgtcgaccttgccgaagacgatgtcggggttctcctcactcgcggcctcgaacgtggggccgaacgcgcggcacgggccgcaccatgtggcccagaaatccacgaacaccaggttgttgtcggtgatggtcttctcgaagtcctgtgcattgagctgaacggttgccatgatcgtttcctccctcgttgtcatggtgatgttcccatccgttgtcgtcccccagcatcccagcaccactcaacaaactacgccgacggacgaatgcggacgcccgcatcgcgcgttttccgtgattcacatcgcattcaggaatccttgtcgaaatcgacacgttgtcgtcacgcgagttgggcgataattaagaccatgccagttttgaatgacgaagtacctgacgagggcgatttcgacgccggccgccggcgcggcgaattcgatgacatcacgcccgaggatttcatccgcgggtccggtcacggcaatccgcccggctggctcggtccggccgacatcagtcgtgcccgtcggcagctgccgatcgcttatgtggagatcgtcccgattcgcactgacgacctgggcagggtctcccggatcggctccttgctgcacgtctcggacgacgggtccatagagcgcacgctgatcaccggccgcgtgctgttccatgagagcatccgcgaggccatcgcgcgcaacgtcgccaaggatctgggcgacatagcgctgccgatgctgccgcagagcctgcagccgttcaccgtagccgagttcttcccgacgccgggactaagcgagtattacgatccgcggcagcatgcgataacgctgtgctatgtggtgccgatcgccggtgactgcaagccgcaggacgagacactggacgtcgagtgggtcgatccgcgcggtgagatgatggagacgttcatccggcagatgacgaacgggcatggccgtatagtccgtcaggcgttggcctggctggatttgtgacgtgccgtctctccgtccggccggtccgcgagaggacgcgggccggccggacggcggcatgatcggtgggaatggggcgcggacggcggccgacgacagtggccgacaccgggcgatgaaacgatgacgatataggagcgcaacgatgatgacgctgagcaatacggtatacgcgacgggggaaggggcaccgctggtgctggtgcacgcattccccgttgaccaccgcatgtgggacgactgcgcggagcagattgcccggcaggcgcgggagacgggcgacccgtcggtgacggtgtgggcgccggacatgccgggcgccgggaccggtccgattcccgagccggccgacagcgggcgggtggcggccgacggggcgctcacggacgcgctcgacctgatggccgacgcctatgtcgatctggtgcgtgccgccggctacgacaaggccgtatgggccggactgtcgatgggcggatacgtggtgctggacatccagcgccgccatccggacatggtcgcgggactcgcgctgtgcgacacgaaagcgggcgccgatggccccgaggcccgcgcgaaccggctggcgtgcgcgagcgaatgcgaggcgacgcaaaccgtgaagccggtcatgcatttcgccgatgcgacgccgtccgattcaagcttcaagcagtccgatgagggcagggcgctgttcgcccgctggattggcgagcagacgccgcagggcgtgggttggcgtcagcgcatggccgccggcaggcctgacctcagcgatcagctgccgctcgtcaccgctcccgcggcggtgctgtgcggcgacaaggacccgttcagccccaggccggcgatgcgggcgctcgccgatgcgatgaccggcacgtcgccgagtttcacggtcatcgaggattgcgggcatttcagcgcggtcgagcatcccgatcaggtggcgagcgcgttgctcgatctggtgcgacgcgtgcatctgcgcgactgatcgcgggcgcagtcggccggacacggcatccgcggtgcggtggtgccggtggcgccggcggtgtgacctgccgcgacgatgattgacgatggatacatgaggagtgtgaagtgatgttttcaccattggcattgacccagacgttgccgttcctgccgctggcgcagggcgacatcgattatcaggtcgcccggcgcggagatccggacctgttcgacacgctgttcgccgaccccgtcaccaaggtcatcctggtgcggggcggcctgctggccgtgccgcgcggtcagggcaatgccgtcaactatgcctccgcgaacatgaggctgagcacgctgccgggcgcgtacgcgggctccgccctggctgtccaccccgaagtggtgccgatattcctgggatcgtatggcgcgctgcgcaacgagcatgtggtggcgctcgacatcactcggatgtcgacccccggcgcggcctcggcgattccttcgccgtcgctcggcgccgacgcggcgtttgatgccgacggcaatgctcccggtgcggtcgcgcctgacagactggacatgctggaacaggccgtggaacggttcgactgggtggatctgcgcgggttcgccgcgcacgccaacgcccgcgaggccggacaggccacgaccgcggtgaccctgagcatatggtacgccgggcagcggttctgcccctcctgcggggctccggtcaaggcggcgatgggtggatggtcgcagcggtgcacgaacgcgggcgacgggaaccgtctgctgttcccccgcatcgagcccgctgtcatcaccgcgatcgtggacagtcaggaccggctgctcttgcagcacaacagcgcctggcgcaatccgctgctgtactccgtttcggcgggattcgtcgaggcgggggagaaccttgagcacgcggcacggcgcgaggccaaggaggagaccggcatcgacctgggcgaggtgcgctatctcggctcccagccgtggccgttccccgcgtccctgatgatggcgttcaaggcgcaggcgttgagcaccgacatcctggtggacggcgaggagacggagaccgcgcgctgggtgacccgtgacgaatacaccatcgaattgtcggagggccgtatggaagctcccggcaaatccacaatcgcccggtacatgattgaggagtggtacggccgcgaactgtgacatgcgccgcacgacaatgattcgtatgtctgccgggtgttatagtgaagccagagagtcgaagtaaaggaacaggaatggctaacgaatacacgggagacgataatcaggaagatgagcgcacgcaggcagtcttcccgctggatgatcagatgaacatcccgcctctgaacatgcccgcccttcatgacgggtcgacgtttgacgctgagccttccggtctggcgggtctggtccaggagactcaggcgaagcggcaggcggatgcggcctccgcacagacgcaggagtcgcaggagactcaggctttcgacccgttggccgagctggacgatgaggccgctcctgagccgcagcccgccgcacctgcgacttcatcctttgccccgcagcgtcccgccgcggacgacgtcgcgaccgtcgccttcgccgcggtcgccatgaacccggccgatgacgccgcgctgggcaagggcgtgtccgcggccaagacgaagaacccgaagcgcggcatgatcatcgcgttcagcatcatcggcgcactgctggtgctgctggtggccgcattcttcggcacgaactggtatttccaggaccgcgtcgccccgggtgtccgattcggcaacgtcagcgtcatgggcaagaccgaaagcgagctcaccggcatcgtcaaccaggccgtgtccgattcggccatcaccgtcaccgattccgagggcaacaatgtcaaggcgggcctcgacaaactcggcgtgaccgtcaacgtcaagcagaccgtgcgcaacctgctggacgcgaaatccggcaacatgttcacccgcatcaacccgttcgccaagcaggacgtccggctgtccgccacgaccgacaactacaagctgagcacctacctgaccgagcagctcgtcgaggagcaggatcgcgcggtcgcctcgaacatcagctacgacgccaactccaagaagttcatcgtcacggaaggcaacgagggcaaggaagccgacccgtcggacgtgatcgcggccgtcaagaaggcggtctcccagcccggcgaagcacaaaaactgagcgttatgtactccgacgtcgccatgcccatcaccgtcgaaaccgccacgagcgcggcgaacgacgccaacaagcgactgacgtcgtcgctggtcatcggcaactccaagggcaagacgttcacgcttcccgccgatgagatagccaagtggatccaggtcaagcccgacatccagaagggcaccatcacgctggcatacgatcaggacgccatcaagacatacctgtcgcagaacctcgccaagaaactcgaccaagacatggtcgtcgagaagaacatcaccaacaccgacggtaccgtgctgaccgtgacgcagaagggcgtcgacggcgtggccgtccaaagcaccgacgagaccgccgcgcaggtgctcgacgcgctgaacgccggcaggggcgcggagctcacagccacggtgaaggtgaccggccacaagaccgaaagccgcaaggtggactacacgtcgcccaacggcgaccctcacatggtcatcaatctcagcgagcagaaagtgtacgcctacaagggctcgaccctggtgaagactttcatcgtctccaccggcaagccatccacgccgaccgacaacggcacgttcttcgtgcacaccaagtaccagtcgcagaccatgcgaggcgaaggctacgtcacgccgaacgtgccatgggtcacatactacaaccagggcgaaggcttccacggcgcaccgtggaacaccgcgggcatcgccagcggcactccgaagtcgcacggatgcaccaacatgcacgtcgaggatgccaagtgggtgtatgacttcctgccgatcggcgccatggtgcagatcgtggggaccacgccgacctccgccgtgcgctgattttcaggcgattgcgctgactataccgctgatgccggccccgccgatcattgtttccgagcggcggggccggctgcgttttcggggcctcgccgtccggctcagtgtcagccccatcgataagcgctgtgcggtacactgggggcatgagtgacgagaacgcaatcgacaacccgttgaaccttgacatccccgatcacctgcagtattcggaagagcacgtgtgggtggacgattcggtgtccccggccatcatcggcatcaccgcgtacgccgagcagcagcttggcgagctggtcttcattgacctgccggacgagggcacgcgcgtggaggccggcgacgaggtccttgagctcgaatcggccaaggccgtcgaaccgctggtctgcccggtcgccggtaccatccgctatgtcaaccatgacgccgcggacgacccctccgtcgtcaacaacgacccgtacggcgaaggatggctgctgaagatcgagctggacgatgacgagccggaactgctcgacgccgaatcctacgcgaagatcgcccagtgaccggcaccgccgtcggcgaccgacaacgcaagccggcgatggccgacggtgacgaaggtacatgacgacgacatatccgacggatatatttgacatacagctaacgtgataacggatggcggaacccatgagcatcgcacacgacaacacaccacgccggggcggagcgcgccctctcggcgggcgggatgacgggctgcggcatgacggcccgatacatgacggatcggatccggacaacgcggctcacgacccgtccgggcagaccggctccccgcaggacgacatgctcaccgtgccgattcccgcacgcccggtcgtcaccacgttcgacgccgcgtcgcggcacgagcgcatcgaggtgcagccggtactggtgcgccgcatgcgccgggccgtcaccggcacgttcggattgtgggtgcgactgtccaccgccgtcgcgcgcaagctcgactggttcccgcgcgtggacccgtacgtcggctatggcaccgaggtctactctaggctgatctgccgcaccgtgtacgcgcccaagcacagcaacgccggcacactgacgcgcggcatcaaaggcatgctggcgattcccgcgtcccgcgtgcaggtgcgtatcagcatagacgggacaccgctggaaaccgtgcagatcggcgaatccgagcgatatgacgaattcaatcccgtgcgagatctcggcagcgaatacgcggtgtccgacgaaagcggatacctcgatctggtggccgagcatcagctggagaccggcgttcaccgcgtcacctatcgcgtgaaggggcggccggaggtctcggcgaacctgttcaccatcccctccagcgcgaaggtcggcatcatctccgacgtggacgacaccgttatggtcacgcaggcgccgatattgtggaaggccgcatacaacctgctgttcctgaaccccaagaagcgcaactccgtgccgggcatgagcgtgctgttcaccaaactgcaggacatgttccccgacgcgccgttcttctacctgtcaacgtccccctggaacgtggaaggatcgatccggcatttcatctcgtatcacggcttccccgaagggccgctgctgttgcgcgacctcgacccgcgcccgaagacgttcgtgccgtccggtccgcagcacaagctggagttcgccgaacagctcatggcggacttccccgacatgcggttcatcctgatcggcgatgacgggcagaaggacccgaccacgtatgcgaccatcgctcggcgataccccggccgtgtgctggcgatcggcatacggcagctgtcgccccgtgaggccacgggtctgtcgtcgatgatgggcatgacctcgacgcagccgatgcccgtcaccgacgtgccggtgttcaccggcaccactggttcgaacatcatgaagaccatgctgccgtacctcaagcagaaactcggacgaacggacctggcggagtgacttcccgaagagcgaagttcgccgctgtctcaagtcgggccgtataatcacgagcatgacagacgaaacgaacggcggcgtcgccgcttgccgacctcccatcgcccggcgtgaaccggtgaagcgcgtgttccacggggacgccgtgattgacccgtatgaatggatgcgagacaagcagtcacccgaggtgcgcgactatgtggccgcgcagaacgcgtactgtgacgcccgcatggcggggctggcggggctgcgcggcacgctgttcgacgagttgaaggcgcatgtgcaggagaccgacatgtcggtgccggtgcgcatggacggatactggtatttcgcgcgtacccgcgaaggcagccagtacgccgtgcagtgccggttgccggtgcgcggcgaggacgattggacgcctccggaagtcgggggagccggcgatgagggcgggagcgccgtcggagccggttcgctgccgggcgagcaggtggtgtttgatgcgaaccgcgaggccgaggggcatgatttcttcgcgctgggcggcctgtccgtcagcaaggacggccgatggatgctgtacggcgtcgatacgcgaggtgacgagcggtacgacttccgcattcgtgatcttgacacgggcgatgagctgccagagcgccttgagggcatcggcgcggcatgcttcacgccggacgcgcggtgggtgttctacgtgacgcttgatgatgcctggcggccgtgcgaggtgcgccggcaccgcgtcggctcgccggtcgagcaggacgaagtcgtcttccacgaggacgacgagcggttctgggtcggggtcggcatgagtttcgacgagcacagcatcgtgatctgctccgcgtccaaaacttcgtccgaagtgtggatgctgtcgaccgcgacgccggaaggcgagttctcggtgttcatcgcgcgcaaggacgacgtggaatatgacgtgagcttcgcatgcttcgaaggtgccggggctgacggggccgatattccggttgccgtggtgtaccacaatgctcaggatccgaacttcgagatcgacgtgatcgacatgcgaacccatcagccgccgtatacgctgggagaaggcgtgcgcgtggcggtcggctcgccatacgggtgcgcgcgcggcgacgacatggaggcgggcgcgggcgcgaagccggccgggacggcctactcgaatcccgccaacccccggatattgcagggggcgcacgggctggccatcgagggcatcgccatccaccggcatttcgtgacgctcgcataccgcacggacgggttgccgcacgtggcggcgatgaccaagacgcaggcggccgaagacttcctcgccgggcgtccatggtcgttccgcgagctgatgccgccggcgctggacggcgactgggacgtgcccgggcgggccgatgacggtgcagccgaggccgcgggcggaacgctgccgggagccacccatcgtctgtactccatcggaacgggcggaaacccctcgtatgatgcgccgcgcatgcggtacacgttctccagctacacgcggccgggcgaactgcatgagtatgatccggcgaccgggcatgacgagctgctcaagcgggcgcgggtgctgggcgacttcgatccgcgcgagtacatggagcgtcgggtgtgggtcaccgctcgtgacggcgagcgcatacccgtgtcactggtgtggcggcgcggccatgagccggccgctgacagcgcgatgttcatcaccgggtacggtgcttatgagatcagttcggaccccggcttctcagtcgctcgcctgagcctgctcgaccgcggcgtgctgtacgccgtgccgcatgtgcgcggcggcggcgagatgggacgcgcctggtatgagcaggggcggcgcctgaacaagcggcacacgttcgaggacttcatcgacgtgaccgccgcgctgcaggacgcggggttggccgatgcgcatcggacggtggcgtacggcggttccgccggcggtctgctgatgggcgcgattgcgaacatggcgccgcaactgtatgcgggcatcgaggcggatgtgccgttcgtggatgcgctgacgtcgatcctcgatccgtcgctgccgctgaccgtcaccgagtgggacgagtggggcgatccgctgcacgacgcggacgtctaccggtacatgaaatcgtattcgccatacgaaaacgcgccggagggcgcagacggcgaggccggtgcgggcgcggcgtccacgcggtctttgcaggggcagtcgtcgcggccgttcccgcgtatcttcgccaccacgtcgatgaacgatacgcgcgtgctgtacgtcgagccgcttaagtgggtgtcccgactgcaagccgccggcatcgatgcgatcatcaagatcgaagtcgaggccggtcatggcgggacctcgggccgctacaagcagtggcgcgaagtcagctacgaaaacgcctggtgcctctccgtcatgggcctgacccgctagccgcggccgacgtccgtccctgattgcggggcttccatatcgcgcccccgcctgcaaggggatatgattttggggcccgcgggtggggatcatatggttgttccggcattcggactttgctgtgccggatagtggaatgaatgatggttcctgtgccataccacgtcaaaaacaccgttttttcgcgtggtgtggtacagggccttgccacagaattggttttaatcggttacatgcgctgttgtggtacaagaggaatatcaaagatccttgcaaaatggccgatttcgctgtgaagcccggaatcggccatatcgggcgtgtaccacaccacggtcaaaatagcgtttttcggcattctgtggcacagaccatgccgcacagaccatgcgcgaagatcacgtcgcctccgccgtctgtccactagacggactgggcgcattgttttcgagcacggccacataccctgttggctatggcaaagaagtatacaatcgccgttatccccggcgatggcattggcaaggaagtcaccccctgggctcagaaggcgctggaaaaggccgctgagggagtggctgatttcgaatacgagaatttcgacctgggggcggagcgttatctgcgtgatggcgcgatcctgccggacgaggagctggagcgcatcaagaagaccgatgcgatcctgctcggtgctgttggtgacccgcgcatcaaggccggcatcctggagcgtggtctgctgctgaagctgcgtttcgcgctcgaccagtacgtgaacctgcgtccgtccaagctgtacaagggcgtcacctcgccgctcgcgaaccccggcgacatcgatttcgtcgtggtgcgtgagggtaccgagggcctgtactgcggtgccggcggagcggttcgtcgcgacactcctgccgaggtcgccaccgaggtctccatcaataccgcgtacggcgtggagcgcgtggtgcggtacgcctatgagctggcgatgaagcgtcgcaagcacatcacgctggtgcacaagaagaacgtgctcgtcaacgccggcgacatgtggcagcgcatcgtcgaccgtgtcggcgaagagtacccggaggtcacgcacgactaccagcacatcgatgcggccacgattttcctcgtgtccgatccgtcgcgcttcgacgtgatcctgaccgacaacctcttcggtgacatcctcaccgacgaggcaggtgccgttgttggcggcgtcggctattctgcgtccggctgcatcaacgcgagcaacgagtatccgtcgatgttcgagccgattcacggttccgcgcccgacatcgccggtcagggcaaggcgaatccgaccgcggccatcctgtcggccgcgatgctgctgcgccatcttggcttcgacgatgccgcggcccgcatcgacacggcggtcgaggctgatatcgaggaactgggctccaccgttcgctccaccgatcaggtcggcgaggatattctcgctcgcctgtaacgcggcggtggcgtgaaccaccccagtctcgttttgctcgacagcccgccagcgggggcctatatctcggtcccgctggcgggctgtcgagcaaagcgagacttcgtgtatcggggtttgagacgaccacgcggacagattcggcgtgtaacgtgtatcgggtgaatatcgaaagtcgtggggaatgcaagcgcccgggcggcaagttggtcggggtgacagtggcgtgcgcgccggataacggccacgtcgtcggctgtcgcgtggacggtgattttttcgttgaaggtgacgatgccgcggtcgacaggtatctgcgctgtctgaatgcggcgcttctcgatatagcgcagcgtgatataacacagtgcgatacgccgcccgatgatccggataccgtctcctatcttgaacgcatcgcacgcgatgagcatgtatccgttaccggcgcgaatgcggaaacgatactgaccgcgttgcgccgcgcgctgtcggcttgcggccgggacgccgcgcgaccggcatcctcgcgcctcgcttcgcccgcctccgtgacggcgcatgacgcgcgcaggcgtgcaacgccgtccgccgcatcggctgttccgacctcgtctgtcacaattacgccggcggcctcggcgcctcaagcgtcccgcggtctcacaccgccgacattccccggcgagtggcacgaccgctggcatcggctcgcgccgaaaatcgtcgtggacaagccccgcaggccgcaggaacagatggatgtcgacgtgcaatggtcccgtgaggtggccgcgggggagcgccctgccactatccggttctggcagtgggcgtccccggccgtggtggtcggccggttccagtcgattccggacgaagtgcacgaagacgtcgccgcgaaggagggtttcacggtcgtacggcgctgcacgggcggcggcgcgatgttcatcgagcccggcaacacgatcacgtactcgctgtacgcgccgcgctggttcgccgcggacctggacatcgaggaatcgtaccgtctgtgcgacatgtggctgatcgccgcgctgcgtggcctcggcctcgacgtcggcttctccggtctcaacgacatcgcctccagccatggcaagatcggcggcgcggcccagcgcaggttcccgcccatcggctccggccccggttcgatactccaccacgtgacgctcgcctacgatatcgatgccgtgaagatgacccgcgtgctgaacatctccggagagaagatgtccgacaaggccgtgaaatcggccgtgaagcgagtggacccgatgcgggcccagaccggtctgagccgcgacgggctgattgcgcgtctggcggactgtctgacgcaaccggacggtcccggtgcaaactaggctacaatatgacagaaccgaccgaagacagagacgcgacgggttggattccgtcgcgaggacgccgatgcggatgcggtggcggatggtgcgccgtcgtcgcgatatcgcaggggctccgtgtcgaggtgccggcatgtcggaaacgtgaccaggaggcgtcatgagggcaatcgggccgaattcgttccccgaagaggacaacgagctgttgcatacgccgttgttcaagcaggtgtcgccggagcaggccaatgagctgattccctacctgcacgaggccgtattcgacaagggcgactatatcttccgcgagggcgacagggaccaccgcatgtatctgctggagcgcggccgcgtcaagctgatccgcgaatccaaggacaggcgcgtgcagctgctgtcgatccacgcgcacggcgaactgctcggcgagattcccgtattcgacccgtccggcggcccccgtaccgccacggccgtggcgatgacccacggcacgcacgtggcatggctggagcatgacgcgttgttcgcgtggctcaacgagcacccgcgcgtcgccatcgacatgctgcaggtgctggcgaatcgcatgcgcggcaacaacgagcgcatatccgaccttgtgttcatggatgtgcccgcccgcctggcgaagacactgctcaacctcggcgcgcggttcggcgagccggtggaagccgggctgaaggtgccgcatgacctgacgcaggaggagctcgcccagttggtcggttcttcgcgcgagacggtgaacaaggcgctgatggatttcgcgaaccgtcggtggatcgcgcgcgagggccggtcgatcatcatctaccagccgggcatgctgattcggcgctcgcaacggtgacggctgcgccgagcgcggtgaacgcccggcgttccagcggccgttgggggatgattcggcttgtttccggtcgttttacagtcttctgaccggtttgtgagtaccctgtgagggattgggaatcagtcgttcggatgacgtgcccggtagagacgcccctctagaatggcaaccatgcccaagaagaaatccctgaccgcaaaacgtgtgttgtcgctgttcctcgcgtatgtgctgctctgtctcgccggaggcgtcgtcaccagcgcgttcttccttcccgccgtgttcgcatcgaacaacgtggtgcgtgccatcgtgccgtcgctgcaggtggagggcatcgatttcaacgtgaccgacctgccgcagcagtcgcgtctgtatgcgtcggacggtacgacgcagatcggtacgttctatgcgcagaaccgtatcgtcgtgccattgaagaagatttccaagccgatgcgccaggcggtggtctcgcgtgaggaccgtcgtttcttccggcatgccggcgtggatatccagggcgtgatgcgtgcgttcgtggcgacctacgtgaagaagggcgccactcagggcggttcctcgctgacccagcagtacgtcaagaacgtgctgctgctgcaggcgcaggaggacaacgatccgatcgccgaataccatgcatccgaggagaccgtggcgcgtaagctgcgcgaaatgctcatcgccgtgcagatggagaagacgtattcgaaactggagattctgcagggctatctcaacatcgcgcagttcggccgtggcatttacggcgtggaaatggccgcgcgacgatacttcagcaccacggccgacaagcttgacatcgtgcaggcggccaccatcgccgcgatcacgaagaacccggcggccttcgacccctcggtggagagcaaccaggaggcctcccagagggagcgcaacatcgtgcttgacctgatgtatcaggaaaagtacatcagccaaaagcagcgtgacgaggccaaggcgaagccgctgaaggacacgctgaaactgcaggatgcgcaggcggggtgcagcgcgtccggcgacgcggcgttcttctgcgactacgtcaccaagaagatcctcaactcgaaggagttcggcaagaccatcgaagagcgcaagaagctgctgtatgagggcggcctcgacatctacacgacgatggacgtcaatgcgaactctgcggcgatgaaggccgcgcgtgcggccatcccggcggacgacgcgagcaagatggaagtgatgatggcggccatcaagcccggcaccggcgaggtgcttggcttcggcatcaacaagatatacgacacgtcgccggaagcgaacaacgatccggccagaaccgccatgaacttcgccgtggaccagatagacggcggcggtagcggcttcccggtcggctccacatggaagccgatcaacctggtggcctggatgcgcaaggggcactcgatcaacgaggtgctgccggctccgggcgtcgtgaacctataccgtgacattcccggcttccgcggcgtcaatacctgggacgtgaagaactccggcggcacgcccggatacgcggagtccccgctcgacggtctggtcaactcgcacaacaccacgcaggccgccatggcgaaggtcatcggcctcgaacccatcgcgcaggccgccgaggacataggcttccatcaggcgtccaagcagaagatgaacatgcatctgaaggacgacaccgcgaacggcggcgcctatcaggccccgctgatcatcggtggtacggtgtccgccgcgccgctgaccatggcgaacgtgtacgcgaccatcgccgcgaagggagtcgaatgcacgcccatcgccatcaagaaggtcaccgacgccaccggtgccgagcttgacgtgcccaaggcgaactgccatcaggccgtcgacccggatatcgccgaaaccgtcgcctacgcgatgaaccagggcgtcgtgcgccccaacggccaggcgaggaccgcccagctcgccaacaaccgcaagacgttcgccaagaccggtaccaacgagaacacgtacatgctgacaggcggattcgtgccgcagatcgccgcgttcgtcgccgtgggcaacgccgacggcaacagcgacttcgacaacaagaccattaacggcgtataccaccgcacatggttcggttcctatatcgcgaccccgacgtggaagaacttcatggacacgtatctcaccgcgatcaatgcgcccaacgtcgattacggcacgccgtcaagcaagtacgcggcgacctcgaattcgacctcgaaatcgtcaaggtcgagtaccagcacgacaaacgggacgaccagcggaaccggcggaacgggcgataccagcggccagtacacgcagacgcagaacgacacgaccaccggcggcaatcagaccgagggcggccagaccaccggcgggcagtgacgggcggtggttcggcagctgagccggtgagctgagccggcgggccgatgcaccgaaagcggcggttcgccgcgtgaggcaggggccgtatgagcatgaacgctcatacggcccctgcccgatttccgacgcattgcgcaggcggagaacatcggtgcacgagtcgtgcttgagtctgtgcgcggtgagatgattagaccggtggttgcctcgccgtggtttggaagcatcccgacttcccggctcgcggattgggagccatgcgaattgtcgaggaaaggacgaccatgaacgctgaggggaagaagaaggccaagggcggcaaaggggcagtgcagctgttccagccgatgacgttgcgcggcgttaccatgcgcaaccgcatctggctgccgccgatggatacgtattcggcggtggcgcgggacggcaagcccacgccgttccattaccagcattatgtgtcccgcgcgatgggcggattcggcatgatcatcgccgaggccaccgcggtgacggccgacgggcgtatctcgccgcgcgatgtgggactgtggaacgacgatcaggtcgccgcctggcattggatcgtcgacggcatcaagcaggccggcgcggtggcggccgtgcagctcaaccatgccggacgcaaagggtcgaccggctgcttcggcgtcggtttcgaggggaagaatgtgcccgaggatgccggcggatggcgtacggtcgcgccgagcccgatcgcgtaccgtgggctcaccgatccgcgcgcgttgagcgtcgaagagattcacggtctggtttcggcgttccgggatgccgcgcagcgtgcggtgcgggccggtttcgaggcgattgagattcatgcggcgcatgggtatctgatctcgcagttccttgacccgctgtgcaacgagcgcgcggacgagtacggcggcgatatccacggccgcatgcggttcctgctggaggtcgccgatgcgattcgcgaggtgattcccgacacggtgccgctgctggtgcgcatttcggccacggactgggccgcgggcggctgggatctcgatcagacggtcgataccgcgtgcgtgctgaagcagcacggcgtggacctgatggatgtgtccaccggcggcatcatcgccgacgtgagcattccggtcaaggccaactaccaggtgccgttctccgatcaggtgcgcgaacgcgccgcaataccgaccaccgccgtcggcctgatcaccaagccgaagcaggcggagaagattctgcgtgcggggcaggccgatgcggtcgagatcggccgtgccgcgctgcgtgacccgtactggccgctgcgcgccgccgccaagctcggcgtgcccgtctccaaggcaccctaccagccgcagtacatccgcggcgccttccctgaggactgagcggcagataaacgtagaccacctccagtcatgctacgcatgactggaggtggtctacggctgtgtcggtcaggcgtcgatgccgacggcgtcgctgatgtgttcgaagccgtcgcgcttgaggagcgccgcgaggccgcgcttgagtacggtgatctgctgcggtccgcggtacatcagtgcgctgatgaacatgaccaggctggcgccgttgcgaatcttgcgatatgcctgctgcggggtgaacacgccgccgatgccggcgatggcgaaacgctcgccgtattcacggtagacctgcgcgatgcgctcctcgctggccaccgtgcacgggccgccggacaggccgccctcccactgctgcggaatctccaggccggtgcggtccttctggaggttggcgatgctcagcccctgcacgttgtgctcggcaagcacgtcgagcaggtccttgaactcgggccacgtcttgttgagcggcatcttgaccagcgtcggctgcgggcgttcgatcttgtcgagctcggtgaacaggcggtcgagcgcgtccgggtcggcggtgaacggctcgccggcatgggtgttcgggcatgacacgttgacctcgaccatggcgctgcgtccggccgcgcggcgcatggagatgcagtagtcctcgatgccttcgtccaggtcgccgcacttgtcgtcgttggtgcgtgcgatggagacggacacctgcatcgtcttcgcgtttgtccacgcctgctccgcgcggtcgatcaccttgtcggacccgtcgttggcaaggcccacgtgcaccatcatcgaatcgtattccggaagacggtggaaccacggcttcgggttgccggcgctggcgcgggaggtcgtggagccgaccgtctcgaagccgaagccgacgttgtccatgagcaccggcatgtcgcagttcttgtcgaggccggcggacaggccgaacgggttggcgaagtcgacgcccatcacggtggtctccagcacggggtcggtgtagtcgagcatctcgcgaagcagccacatgagcggcgggatgcgtttggtgacgttgcagaactcgatcatctggtcgtgcgccacatcgggggtgtggttgaagacgaaattgggtttgatgatatttttgtaaccgaaagtgaacaggtcggtggttgctttgttcaccgcgtcgtgccagaagttttccgaaacataagccatgccctccattgtgtcacgcacgcgaaaaaacggcaacgatgcggttgcgcgggtgcggtcggatccggcgggtgggggagagtgcggtaaaagtgatgttttgttcgtttttatggaagtgatgtgcgcaacacgcatgtcaaacattacgaaacgcacatattggtttggtttatgcgcgaacatgtgcgataatgttcacatgatatcctcacaacgtcaacatctgatactgagccgtctgcgtacgcgcggcgcagtgcgcatcacggcgttgtctaaggagctcggcgtttccgcgatgaccattcgacgtgacatcgccgatctctctgacaaaggtctgctgaaacgcgtgcatggcggtgccgtcagcaccagcgcattgctcagcgagccgctgttctctgtaaagtcgcagatggacattggtctcaaggacgccatcgcacgtgaagcggtgcaatatgtggcccccggcgatgtgatcgccataggaggcggcaccacggcctacgtgttcgcgcagcatctgctggaaagccagcaggcgtcgggcatcaccatcctcaccaactcgattccggtcgccgagctcgtgcaggcgttggaatccaaggatgtggaggtgatcgtaacgggcggcgtcaccacgcggtcgaactcgctggtcgggccgatcgccgataaggtcatcgcgtcgctgcgcgtcaacaccgtgtttctcggcacccattccgtgtcgattccccgtggcttcctcatgccgaactcgctggaggcggccaccgacatggcgatgatgggcatcgccgaccgtacggtcatcctgaccgaccacaccaagtggagctgtacatcactatcgttgttcgcccggttcgaccaggtggacacggtcatcaccgacgatggcctcgaccacgagtccatcgccaagacaagggatttggtaaaggaactcgttctggcgcaccagagcgaacacaccgaagaaagtgagtgacaccatggcagaaatcaccaactacaccccgggagagtatgcgaaggagcatatccgcatcacgccgaccacgctggccgacggacgcgacttcttctatctcgacgacgatccggaatacgtctccggcgccaagacccgcgagctcaaggacccgcgcccgctggactaccgcttcgccccgcacctggacgccgacggcaacgaagtgccgtacgccgccccgcagatgcgccgcgacccgctgaccggcgactggatcccgatggccaccgcccgcatgaaccgcccgatcaccgccggccccggcgccaccgccaagggcaacccgctggccgcgcgcaagcccggcgacccgtaccaggacggcgaggtgccggacaccgactacaacgtcgtcgtgttcgagaaccgtttcccgtcgatggtgcgtgtgcccggtgtctccgaagacgtcacctacgtcgacggcaacccgctgtgggagaagaagctcgccgccggccgctgcgaggtcatctgcttcgacccgaacgaggacggcctgccggccgacctgccggtgtcccgcctgcgcacggttgttgaggcatgggccttccgtaccgccgagatctccaagatggaaggcatcgagcagatcttcccgttcgagaaccacggtgccgagattggcgtctccctcgcccacccgcacggacaggtctactgctacccgttcatcgccccgaagatggagaaggaactccagcacaccgaggcctaccacgagaagaccggcggcaacctgctcaaggacatcatgaacgccgagctcgaagccgaggagcgcgtcgtgatgcgcaaccacagctgggtcgcctacgtgccggccgccgcccgctggccccttgaggttcatgtggctccggtgcgcgacgtgctcaccctcgaccagctcaacgaccaggagcgctgggacctcgcctcgatgtactcgcaccttctgaagcgcggcaacgcgttcttcgacaagggcgacggcaagggcatggacctgccgtacatcgccgcctggcatcaggccccgatccacgacgcgcgtcgcgagaactaccgcctgaacctgcagttcttctcgttccgccgcgccgccaacaagatcaagtacctcgccggctccgagtccggcatggccgcctggatctccgacaccaccccggagctcatcgccaagcgcttccatgagcttggacagatcgacatctccgactgacaacgttctatgggggagtctggccgaaccgggctccccctagcaatatccactgcatatatagccatcacacagaagaaagaacaccaatgactgctgttgaattcattgagccgttgtcccgcgaggatggtgtctcacgggcgacgaagctgttcgtcgatatgtatgccaccgcgcccgagggcgtgtgggccgctcccggccgcgtgaacctgatcggcgagcacaccgactacaacgcgggcctgtgcctgccgatcgcgctgccgcaccgcacgttcatcgcgctcaagccgcgcgaggacaccaaagtccgcgtcgtctccgacgtggcgcccgacaaggttgccgaggccgacctcgacggcctcaaagcccgtggcgtggacggctggtccgcctacccgaccggcgtggcctgggcccttcgcgaggccggtttctcgcaggtcaagggcttcgacgccgcgttcgtgtcctgcgtgccgctgggatcgggcctgagctcgtccgccgccatgacctgctcgaccgcgctggccctggacgacgtgtatggtctcggctacggctcctccgacgcgggccgcgtgacgctgatcaacgccgcgatcaagtccgagaacgacatggccggcgcctccaccggcggcctcgaccagaacgcctcgatgcgttgcaccgaaggccacgcgctgctgcttgactgccgtccggagctcaccccgctggagaacgtctcccagcaggccttcgacctcgacaagtacggtctggagctgctggtggtcgacacccaggcaccgcaccagctcaacgacggccagtacgcccagcgtcgcgccacctgcgaggaggccgcccgcattctcggcgtcgccaatctgcgcgtcgccgccgatggcatctccaaggccgacgaccagttccaggcgctcaaggagacgctggatgccctgcccgacgtgacgatgaagaagcgcgtgcgccacgtcgtcaccgagatcgagcgcgtgcgctccttcgtgcgtgcgttcgcccagggtgacatcgaggccgccggccgtctgttcaacgcctctcatgattcgctcgccgcggattacgaggtcaccgtgcccgagctggatgtcgcggtggatgtggcccgcaagaatggcgcctacggtgcgcgcatgaccggcggcggcttcggcggctccatcatcgcgctcgtcgacaagggtcgcagccaggaagtcgcgcagaagatcgccgacgagttcgaggctcgtggcttccatgcgccgcgcgccctgccggcggttgccgcgcccagcgccagtcgcgaggcctgattatcgcagcgaacggttctcaataagaaacgtgcgaggattcctcacaaaagcgcacatatgaacaatcggcggaagcccggaattccggacttccgccgattgttttgttcgtttcgcgcgcgatgaggctcgcacctttcttattgagaaccgttcgctgcgacaaccaaaaagggagcggatttcgccgctcccttttttatctatctcagatcacttctcgtaatcctcgtccttgctttccttgatcaggaacagggcgatcagggcgagcaaggacatcacggcgaggtaccagccgacggactcgacggcgccggtcgacttgaccagtgcggtggagatggccggggcgaacgcgccgccgaggatggcggcgaggttgtagctcaggccggcgccggagtaacgcacgtgagtcgggaacagctcgggcagataggcgccgcaggggccgaacaggccgcccatcagcgcgaagccgacgcacaggaacagcatcacggtcaggacgttgtgctgcagggactgcatggcgaacagactgaacaccagcgtcgcgagcgtggtggagatcagcacggtcttgcggccgagcttgtcggagtagatgcaggtcacgaagatgaagatcgcgaagaacaccacggaaaccatctgcatggccaggtattcgttctggctgaagggtggcttcatgaccttgacggcgtagctcagcgaccacgtgcccagcacgtagaacagcgagtatgtgatgcccatggcgaaggtgccgagaagcacttccttccagtacggcagcagcgagcgcagcgggtgcttcaccacgcggtcctgctcgactgccttgcggaagatcggggtctcggtcatgcgcagacgcacgtacaggccgatgatgacgagcactgcggagcacaggaacgggatacgccagccccaggcctgcatggccgtggatccgagcgtggagtcgagcagcaggttcaggccgtaggcgcagaagaagccgatcggggcgccgaggttcgggaaggagccgtacagggcgcgcttgttggccggggcgttctcggtagcgaccagcgcggcaccggaccattcgccggcgagacccacgccctggcaggcgcggcagatgcacaggatgacgatggacaaggcgcccagctgctcatagcctggcagcaggccgacgacgaacgtggagatacccatcgtcatcagggcgacgaccagcgtggtcttgcggccgatcttgtcgccgaagtggccgaacagcatggagccgaacgggcgggcgaggaacgagacggcgaacgtcaggaacgcgtacatcgtgcccagcgccggattggccttcgacgcggccgggaagaaaatagtgccgaaatagctggcggctgcgatggaatagcagtagttgtcgtagaactcgatggcggtgccgaccatggaggcggcgatgatctcgggaaccgagtccttcttcaccgcaccggccttggacacggccgcggtagcagtagcagacatgaaagtctaacccctctaattcattcaatctctgatacgagccgacgccgcgaccgattgtgcggtgcgtggtcgatatgctcgcgggtagcggggtgcgtgggcgtcgtcgcccgagcttgtggccccagcgatgcgctcacacaccgctgtgcttgatgtaaaggtgtagtcgacttatgaaagcgatggtaatactgctcacattgtggacgattgtccgtttgcgcctggatgatccccgcgtgaacaatgccgacgtcggattcggccgatggcctgcggacacgcccaaatggacggttcggcagtatttcacgcccgctccatatacttgacactacttgcagtaatcggtttcgagcgggggagtcccatgaacaaggcaatcatcaccgtcgtcggccaggacacggtcggcatcatcgcgcgcgtgtgcacgtacctgtccgatcacaaggtcaacgtgctggatatctcacagaccatcatcgacggcttcttcaacatgatgatgatcgtcgactactccggcgcggacaacgagttcggcgtgatcgtcgaggacctggacaagctcggcgagcagatcggcgtgcgcatccgctgccagcgcgaggagatcttcacgaagatgcaccgcgtctgagtctcgaaaggaacgaatcatgctgaatatcatggaggtccgtgagaccaaccagatgatcgagcaggagaagcttgacgtgcgcaccatcacgatgggcatctcgctgcttgactgcgcggcggacagcgtcgacaaggtgtgcgacagcatctacgacaagatcactacctacgccaaggacctggtcgccaccggcgaggcgatcgagcgggactacggcatcccgatcgtcaacaagcgcatcaccgtcaccccgatctcgctggtcggcgcgagctcatgcaagagcgaggacgatttcgtcaagatcgcgcacgcgctcgatcgtgccgccaagaaagtcggcgtcgacctgatcggcggctattccgcactggtgtcgaagtccatgacccccgccgaggagctgctgatccgctcgctgcccaaggcgctgagcgagaccgacatcgtctgctcgtccgtcaacgtcggctccaccaagaccggcatcgacatgaacgccgtcgaactgctcggccacatcatcaaggacatcgccgcgcgcaccgccgacaacgactcctacggatgcgtcaagttcgtcgccttctgcaacgtgcccgacgacaacccgttcatggcgggcggtttccacggcgtgaccgaaggcgatgcggtcatcaacgtcggcgtgtctggccccggcgtggtgtctcgcgcgctcgacgcggcggtcggccgtgatttcgagttcctgtgcgagacaatcaagcgcaccgcgttcaagatcacgcgcgtcggccagctcgtggcgcaggaggcctcgcgccgcctcggcatcccgttcggcatcatcgacctgtcgttggctccgacgcccgcggtcggcgattcggtcggcgaagtgctggagaagatcggcctggagcaggtcggcgctcccggcaccacggcggcgttggcaatgctcaacgaccaggtcaagaagggcggcatcatggcgtcgagctacgtcggcggtctgtccggcgcgttcatccccgtctccgaggacaagaacatgatcgacgcggcggcatccggctgcctgacgctggagaagctggaggccatgacctgcgtgtgctcggtcggccttgacatgatcgccatccccggcgacaccagcgccgccacgatctccggcatgatcgccgacgaggccgccatcggcatggtaaaccagaagaccaccgccgtgcgcgtgatccccgtggcgggcaagggcgttggcgagatggccaacttcggcggtctgatgggctacgctccgatcatgccggtgaaccagacgagctgcgaggcgttcgtgacccgcggcggccgtatcccggccccgatccacagcttcaagaactgacgaggtgcgcggcgctcctcggtgagccggtgtcgcagcgatatcgctgagctgatagtgccgatatctcaagcggccgtttccgcatgtgcgcgggaacggccgctttcattattatccccatccaagccgcctgacgttttcttcccctccccgtcgccgattccagcagtggagtactgatgaatatcggcggggaatttgctgggcatcaggttactgtgcatacacttgcagcgtaggggaatagagaaaaacgacgttgaatttatgatgtcggcagaaggcgcatgacgtgcatcagacacaagcatcatccgatttggcctcatccggcatagggcatccgtcccgttctccgctgccgtgccgtccgtgcctccgtgtcgcctgcgccgtctgctgacgggtagtgtggttccgttgctggccgtcggttgtgcgtacctactgattcctgcgttcggccacgcgatttggtatgacgagatctattcggtggcgctcacctcgcacgggtggagcggcatatggaatctgggctcgcttgacgtgcatccgatcggctactacatgctgctcaatctggtgcggctcgtgttcggcgaacatgtggtggcgtaccgtctgatgtcggcggcggcatcatgtgcgctggtcgtcgccggatacgcgatgatgcgccgggactggggagcgcgcgccgcacggctgttcgcggcgttggcgtgcttcgccccgccgttcatgcgcatggcgttccagattcgcatgtactcatgggcggtgctggccgtcgcgatgtgcttcctgttcgcgatgcgcatctgcatcaaggcgcgcggcagtgggcccgtgcgcgtgaacgagtggatcggattcgcgctgttctccctcgccggcgcgtacctgcattactatgcggtgctcgtcgtgaccatcatcaatgcgatcgtgctcgccgtcgtatgcgcacgcgccgtggatcgcgcagatgctgtcgcaggtgcgcagtgtgtcgtcggggtattggattcatttcgagttcccaatgacgttgatccggctgatcgattatccgctgatgggcgagggtgcgcggaacatctatgatccggcgaacgatatgcctgccgactatatcgtgaaggccgtcggcgggaacgtgcaccgcaatgccgtcatcgtctcagacagtccccgcatacttggcgtgctcgccgcatccgggcgccgggatattccgctgcgctacgcgttgtggactgaagacgcatggtgggatcagcgggctttgccggcgtatctggaccgggttcgcgtctgccacagctgggatatggccgtgcagtctgataccaggcaagtcgttgtgattcgctcgttgccggccggccctgcgggagaggccagaccgggcaatggcgaggtcaaattgggtggattcatgagaggcctttccggccgcaagagcctgcgcgaacatcgtgtgttcgtgcggccgtatgaccaagacgtgggccgtgtgggtcttcgacgtgcgtcggtagatgttgttgttgcgccgtcttgccgactttgccctgtgccaggcgcggttctgacatggtcgtgggctcggctggggttcgcagatggccgggcgtgattctggagcggtctcgtcctcgattgtgtgccacaccagggcgaaaatgggtgttttgagcctagtgtggcacaatttgtgccacagaatgagatgtaagcgcttagaatccatgtcgtggcagttggctgtttcgcgatattgttggaaaatggccgaaaccgtatgccgtagataattgatgccgaaatcgcctgtgccataccaaggcaaaaatgggtgtttttgccctggtatggcacgcaatccgcgacttgtctcatggatcgagacaagatatatcggatattgattcaagcggtgagtggaatggttgcgctgtttaaaccacgcctccgagggcttcatgccgaccgggaaatgcatcgtgacgtggaaatcgtcatggattgcgaggtataaggggctacacatacgctaacaacgcgtcactgtgcgtgggcagcgtcactgtgcgtgtgcccacgcacagtgacgtaccggcaaacccttgatattgcaatgtttttcaggaatcgtcactgagtgtgcgtccacgcacagtgacgacttccacgcacagtgacgcacttcgtgctcgcgcactgccggcaattgtgattttgcctcgcgaggctcatggtttcctcgctcgtccctgtcgggacttgctcggcgtcgctactcggaagcccactgggcttcctccctacgctccgcccttgaaccctagttggcgccaggcttcgtagatggcgatggaggcgcagttggtgaggttcaggctgcgcaggctcgggcgcatcggcagccgcacctgttcggccacgtgcgggccggccatgatgtccatcgggtcgggaatgtcgcccggctccggcccgaacagcagaatgtcggtcggcttgtactcgacctcggtatacagtttcgtcgcatgcgcggtgaacgcgatgatgcgcgaattcggcatcgactcgaccagattgtcgaagttcggatgcaacaccacgtgagccatgtcatgatagtcaagcccggcacgacgcagcttggtatcgcgaagattgaaccccagcggctccaccagatgcaggatggtgccggtcaccgcacacaggcgaatcgccgacccggtattgccggggatgcgcggactgtaatagcacagatgcggcgtgaccgtctccgtcgcggcagccttctcggccgacagcatcgcgtccacaacgctgatcggattgccgtgcgcgtcggtcaccagctcgtcgggaccataattcgacttgcggtagccgtactcgaacatcttctcgaccttcgcctcggcctcttccgcacccttggtttcgctcatcatcccgccttgtctctgccggttgtcttcgaccttcgagcttaaaacagcccatacccgtaacagctgctcgaaggagagaccatgagacaattattccgccgtatcacgaccatatccgccacatgcgcgttggccgtttcggttgcagccgcagtcgcggtggccgccgaacccaccacaggcaacatacttaccggcaaactgcccacggccaacagcacgcatctgatcggcgacggcgacaccggattcggcccgaccgacagcaacatcaccaaaatcatcgccggagaagagaacggcagcgcggaaaacaacggatacgccagctgggacgacgtatacctgcaatatgatttcggcgagccgagagatacactccatcaacctgtaccgcaatgggtatgagaacgcgctgaacacgttcaagcgcatcaaggtcgaagtgtcctccaacgaggacttctccgacgcgaacgtgctgttcggcaccgccgacgtcgaggaaaccgccgcgaccaagctcgccgcgcagaccatcaacctgaccacgcccgtcaccgcgcggtacgtgcgcatctggcagaagggccattgcatccagaacacgaactcctcatggaagggatacggcaacggcgtgggattgcgcgaaatcgaggtcatcgccaagctcaaggacggcgagaccctgccggacgcgcaggagacgcgcaacatcgcgctcggcaagttgccgtatgtgtacggcctcgacccgaccaacatcgcggcgatcagcgacggcaagcaggacgacaactacgccgtgcacaacagcaccggcgagcggtggctgcagttcgaatacaagaaccgctaccgcatccacgagggctcaagccgggcacctatccgctggtccgcataggcgtgtcgtcgacgcccacgtcggccggcaaggacgtcgacggcatgcattcgcgaccgatgttcccgattccggagacgcaggtcggcgacggctgggtcggcgacgtcgactacacgaagcaggccacgaagcaggacagcaatttcctcgtcgactgggtgcgcgtgtaccaatccgaggggcagccggtgacgcgtttcgacgacctgtacggcgccgagagcggcgcgtaccggatcgcccccgcctcacggaccgaggggctgaccgcagtgagcaacgtcgacgccgcctggcagaacaagaacaacttctactacggcggacagccgcggtatgagaccagccgttcccatgccgtgcccctgatgcagggccgattcgccctgcgcttgcgggggccacaaacactctgccgaatccggacgaatgcttttacccgcagcgagcgacccgttgcgggtaaggttgtgccgccgaatcggcgaaatcgcgcggcgccgtgatgatgtagcggtcgccgtgcacaatggagcgatgccagagatacggaacgatacgccggccgaacctgtgggcgagtgcgctgtgcctcgcgtgcgggcgctgctgtccgcatggtgggaggccaacgcccgcgacctgccgtggcgattcgggcgcgcgacgccttggggcgtgctggtgagcgaggtgatgagccagcagacccagatgagtcgggtggtgccgtactggactgactggatgcgcgtgtggccggacgtcaccgcgctcgcgggggcctccacggcggaggtcatcaccgcgtgggggcggctcggctacccgcgccgggcgttgcggctgcaggagtgcgcccgcgtggtgttcgagcaataccacggccggcttccgcaaacctacgacgagctgaccgcgttgccgggcatcggcgactacaccgcctcggcggtgctgagcttcgccttcggcgtgcgcatcgcggtggtggacaccaacatccgccgggtgctgtcgcgcgtattcctcggagtcgaatcgcgcgggggagcggccagtccggccgagcgggcgctcgccggcagggtccttccgcaggatgatgagacggacgttcgtgatgccatcgaagccgcgaatgcccgcgagacggtgaacgcccccgaatccgcaatccgcgagatgccgcagcgcagcacccgcccgtcggtcatatggaaccagtccgtgatggagctcggcgcactggtgtgcacggccaagaacccgctgtgtgaccagtgcccgatcggtgagcattgcgcgttcctcgcggcgggccgccccgggctgggagagcgacgcacccgcccgcgccagcgtttccaaggcaccgaccgtcaggtgcgcggcatcatcctcgacgcgctgcgcgctgagccaatcctcgcccgcgaacgcctggaatccctgtggccggatcacgtccagctcgacaaatgcatcgcctccctcgacgacgatggcctggtcgacatgctcccggatggttcattgcggttacctcaataagtgcgctctcaaaactcgcagatagagggggtttatccccgaaaacccctctatctgcgagttttgagagcgtgcctgaggtagactggacggcatgcccactcagcccacccgtcagccgcgacccggttcgcggcaaaagccgcgcaagcgcgtcgtcagcccgcaacgacgggcgatgtaccgtcgccgccgtgcggtcgcgctggtcattgtgctggccgcggtctcgctggtggtgttctgcgtgtacagtctcggccgcggcgtggtggatggcgtgagcctgctgcgtcccacaccgatcgcgcgtgaatcggtgccggcgccgaagaagaccagcggcgtcaatgattgtggtgcgtccgatgtgaagctgtcgctgacggcggcttcccaaggcgttccggtgggaggttccctggacttcacggcgagcatcagctatgaaggcacgtcgagctgcctgctggatctgtcggatgtggtgctgacggtgtcgtccggcgaccaggcgatatacagttcggactcctgccccgctgacccgaaccgtcagctgctggcgaagaccagcgacatgaacaggacgtcgcagaagatgatatggggcgcctcccgcacgggggaccagtgcgtggaggatcagagcaaactgccgaaggtggaccgtggcacatataccgcgcagttgagtctgaagaacgcgcccaaggcggtcagcgatccggtcaccatccaggtgcagtgacggtcaggtgtggcgacggccctgagcgggccgctcgccgcgggctcggcggttgccgcgtccggccgcagcgtgcggcgtgtcgcgcatgtgatgtatgttgcgccgacggctgatttgtgctaaaatttggaatttgcgtaagtgcatgtcatatagcgggcatgtcgacaaagatgaaacgcccgcgattcggcatatggtggccatctgcggcgtttccgggaacatatcgataacgacattagcgagcgataaggaacgtccattggctgacactcaagctacgacgaataccaccaccatcatcgcacgcgccgaccagcatgacattgatctgcacaaggcgtcggaccgtgtgaatttcggctccatccgcgagcccatccccgtgccctacctgctgggcgtgcagaccgacagcttcgactggctgatcggcaacgagcgttggaagaagcgcgtcgaggaggacgaggcgaacggcaccgacaccgttccccacatgtccggccttgacgaggtcttcaacgagatctccccgatcgagaacttcgcgcagaccatgagcctgacgttctccgagccgtacttcgaggagccccgccacaccgtgcaggaatgcaaggagaaggattacacctactcggcgccgctgtacgtcaacgccgaattcgagaacggcgacaccggcgagatcaagtcccagaccgtgttcatgggcgacttcccgctgcagaccccgcacggcaccttcatcatcggcggcaccgagcgagtgatcgtctcccagctcgtgcgctccccgggcgtctacttcgaccgcagccgggaccgcgccaccggcaaggagatcttcggcgcgaagatcatcccgagccgcggcgcatggctggagttcgagatcgacaagcgtgacgtgctcggcgtgcgtgtcgaccgcaagcgcaagcagtccgcgatcgtcttcctgatggccatcggcatgaccaagcccgagatccgtgatgcgttcgaaggctactcgctcgtgctcgacgcgctggagaaggagaccatcgagacgcaggacgaggccctgaccgacctgtaccgcaagatccgcccgtccgacaccgccaccccggaggccggacgcaacctgctcgactccttctacttcaacaccaagcgctacgacctggcccgcgtcggccgctacaagatcgaccgcaagcttggcctggagcacgagatcaacgaccgctccctgagccgcgacgacatcatcgccaccctgaagtacctggtcaccctgcacgacggcggcaagaccttcccgggcaagcgcaacggcgaggatgtcgacctgcacgtggacgtggacgatatcgatcacttcggaaaccgtcgtatccgccaggtcggcgagctgatccagaaccagctgcgcaccggcctgagccgtatggagcgcgtcgtgcgcgagcgcatgaccacgcaggacgccgaggccatcaccccgcagtccctgatcaacatccgccccgtgaacgcgaccatcaaggagttcttcggaacctcccagctgtcccagttcatggaccagaacaacccgctggccggcgtgaccaacaagcgccgtctgtccgccctgggccccggcggcctgtcgcgcgaccgcgcatcgatggaagtgcgagacgtgcacgcctcccacttcggccgtatgtgcccgatcgagtcccctgaaggcccgaacatcggcctgatcggctcgctggcgacgttcggccgcgtgaacccgttcggtttcatcgaaacgccgtaccgcaaggtcgtcgacggccagatcaccgatgaagtggtgcacatgaccgctgatcaggaagtcggccacgtcatcgcccaggtgaaccaggagatcgacgagaacggtcggttcgtcaacagccaggcccttgcccgtaaggacgaggaagaggcggtcgatgtcccggtcagcgaagtcgacctgatggacgtgtcgccgcgtcagatggtctcgatcggctcctccctgatcccgttcctggagcacgacgagggccaccgagcgctgatgggtaccaacatgcagcgtcaggccgtgccgctgatcgagtccgagcgcccgctggtgggcaccggctccgaatggcgcgtcgcctacgattccggtgacgtcatcatcgccgacaagccgggcgtggtcacctacgtgtccgccgacatcatccgcgtgatgaacgacgacggcaccaccagctcctacaagctgtccaagttccagcgttccaaccagaccacctgctacaaccagcgcccgatcatcaaggacggcgagcgcgtcgaggccggcaccgtgctggctgacggccccgccatccagaagggcgacctggccctcggcaagaacctgctcatcgcgttcatgccgtggaacggctacaactacgaggacgccgtgatcatctcgcagcgcctcgtgcaggacgacaccctgagctccatccacatcgaggagtacgagatcgatgcccgcgagaccaagctgggcgccgaggagatcacccgcgatctgccgaacgtcggcgaggacgcggtggccaatctcgacgagcgaggcatcatccgcatcggcgccgaggtcgaggccggcgacatcctcgtcggcaaggtcactccgaagggcgagaccgagctgaccccggaggagcgcctgctgcgcgccatcttcggagagaagtcccgcgaggtgcgcgacacgtcgctgcgcgtgccccacggcgagaccggtactgtcatcgcggtcaaggagatcacccgcgaggacgccgaggaggacggcgacgagctgcccaacggcgtcaaccagatgatccgcgtgtacatcgcgcaacaccgcaagatcaccgtgggcgacaagctgtccggccgccacggcaacaagggctgcatctcgcgcatcctgcccgaggaggacatgccgttcctggcggacggcaccccggtcgacatcatgctcaacccgctgggcgtgccttcgcgaatgaacctcggccaggtgctggaactgcacctcggctggatcgcgcactccggctgggacatcagcctcgaccccgatctggaggccgagtggaagaagtacgtgcccaagggcgccgaaaagggcgctccgaacacgccggtcgccacgcccgtcttcgacggcgtgcgccccgacgtcatcaagggcctgctcaagtccaccctgccgaaccgcgacggcgaccagatggtcggcgaggacggcaaggcgcgcctgttcgacggccgcaccggcgaaccgttcccgaagccgatctccgtgggctacatgtacatgctgaagctgcaccacttggtcgacgacaagatccacgcccgttccaccggcccgtactcgatgatcacccagcagccgctgggcggtaaggctcagttcggtggccagcgcttcggcgagatggaggtgtgggcccttgaggcctacggcgccgcctacacgctgcacgagatgatgaccaccaagtccgacgacgtggacggccgcgtgcgcgtctacggtgccatcgtcaagggcgagaacctcccgccggcaggcatccccgaatcgttcaaggtgctcctgaaggaaatgcagtccctgtccctgaacgtcgaagtgctcaacgccgaaggcgtcgccatcgacatgaaggacgaggacgacgatccctcctccagcgctgacctgggcttcaacatcggcgcacgccccgacgccgccgccaaggaagaccagaaggccccggaacccgaataccagtgattccccacgggtcgtccggcccgcggccgcgcagcgaacgcgcggcgcggcgggccggacgacccggacgaaacgtgattgaacatcaatttcaaagacaggacaatacagagtgctggacgtcaacgcatttgacaaactgaggatcggcctggccaccgccgacgacatccgcaattggagccacggcgaggtcaagaagccggaaaccattaactaccgtaccctgaagcccgagaaggacggtctgttcggcgagcagatcttcggacccacccgcgactgggagtgcgcctgcggcaagtacaagcgcgtgcgcttcaagggcatcatctgcgaacggtgcggcgtggaggtcaccaagtcccgcgtgcgccgcgagcgcatgggccacatcgagctggccgcccccgtcacccacatctggttcttcaagggcgtgccgagccgtctcggctacctgctggacatcgctccgaaggacctggagaaggtcatctacttcgcggcctacatggtcacgagcgtggatgaggagcagcgccacaacgacctgcccgacctgcaggacgagttcgataccgagatcggcaacatggccaagcgccgtgacaacgagatcgagaaccgcgcccgcaaggtcgaggaggatctcgcccagcttgaggccgaaggcgagggcaggggccccgcacgcaccaagctgcgcaacggcgccgagcgcgacatggccgccatccgccagcgttacgacgatcagatccagcgtctgaacgccgtgttcgaccgcttcaagagcctgaagccgggcgacttggaaggcgacgtggacctgtggcgcgagatgcaggaccgctacggcgactacttcgagggttgtatgggtgcagaagccatccagaagcgcctgcaggacttcgacctggaggccgcctccaagcagctgcgcgaggagatcgactccggctccggccagcgcaaggcccgcgccctcaagcgcctgaaggtcgtcaacgccttcctgaccaccggcaacaagccggaggccatggtgctgaccgtcatcccggtcatcccgccggacctgcgcccgatggtgcagctcgacggtggccgcttcgcgacctccgatctcaacgacctctaccgtcgcgtgatcaaccgcaacaaccgtctgaagcgcctgatcgagctcaacgcgcccgagatcatgctgaacaacgagaagcgcatgctgcaggaagccgttgactccctgttcgacaacggccgccgcggccgtcccgtcaccggcgcctcgaaccgcccgctcaagtccctttcggacatgctcaagggcaagcagggccgcttccgtcagaacctgctgggtaagcgagtcgactactccggccgttccgtgatcgtcgtcggcccgtcgctgcgcatgcaccagtgcggtctgccgaagccgatggcgctggagctgttcaagccgttcgtcatcaagcgtctggtcgacatgaacttcgcgcagaacatgaagagcgccaagcgtctcgtcgaccgcggcgactccgaggtgtggggcgtactcgaagaggtcatatccgagcatcccgtgctgctcaaccgtgcgcctacgctgcaccgtctgggcatccaggcgttcgagccgatcctggtcgaaggcaaggccatccacctgccgccgctcgcctgcgccgcgttcaacgccgacttcgacggcgaccagatggctgtccacctcccgctgagcgccgaggcacaggccgaggcccgctcgctgatgctcgcttccgacaacatcctcaagcccgccgacggccacgtcgtttccatgcctagccaggacatgatcctcggcctgtactacctgacgaccgtcatggacggcgccaagggtcagggccgcgtgttctcctcatacgctgaggcgcagatggcgctcgacctgcacgagatcgacatgcaggccgaagtgctgatccgcctgccgaaggacttcgtgctgccgaccggctgggagccccgcgagatcaccgtcgtggatccggaaccgggcagccccgacgtcgtcaaggaagagcgcttccacgacggcagcgtgctgttcgctacctccatgggccgcatcctcttcaacgagacgctgcccgtcgactacccgttcgtcaacgagcaggccaagaagaagaagctcgccaagatcgtcgacgacatctccacccggtactccaccgcccaggtggccgcctcgctggatgcgctcaaggatctcggcttcacccgcgcaccttggtccggcgtgaccttcgcgttctccgacgtcgtcgagccgccggagcgtaacgagctggtcgcccagtccgaggaggaagtcgccaagatcaacgagcagtacgacctcggtttctacaccgaagaggaccgccgccaggcgatcatcgacgtgtggaccaagtgcggtgaggaagtctccaaggccatcgagaagaacttcgacccgaagaacaacctctcgatcatcgtcgagtccggtgcacgaggcaacatgacccagatcaaccagatttccggcgtgcgtggtctggtgaacaacccgaagggcgagatcattccgcgaccggtcgagtcgaactaccgccgcggactgtccgtgctggagtacttcatctccgagcacggcgctcgtaagggtctggccgataccgcactgcgtaccgcagagtctggctacctgacccgtcgtctggtggacgtctcgcaggacgtgattgtgcgcgaggaggactgcggcaccaagcgcggtctgaccatgcgcgtcgccgaccgcgacgagaacggcaacctgacgctcgtcaaggccgccgacggtggcccctactcccgtctgcttgcggccgacgtcatcgacccggccgacggcacgaccgtgctgtacaagcgcgacgacgccctgtcgatggacgtgctcaacgacctggtcgcgcacggcgtcgaagaggtgcaggcgcgttccgtcctgacctgcgagtccaagcgcggcgtgtgcgccaagtgctacggctggtcgctggccaccaacacgctggtggacgtcggcgaggccgttggcatcgtcgctgcccagtccatcggcgagcctggtactcagctgacgctgcgttccttccactccggtggtgtggccgccgcgtccgatatcacccagggtcttccccgtgtcaccgagcttttcgaagcccgtaccccgaagggtgaggcgccgatcgccgagttcgccggcgtggtcaaggtggagaacaccgatcacggccgtcagatcacgctgacgccggacgacacgagcgtcgaaccgatcgtctacaccgacacccgtcgcgcgccgatgctggtcaagaacggcgatcacgtggccgccggcgaccagctggtcgaaggttccgtcgatccgaagaagatcctgcgcatcctcggcccgcgtgccgcccaggtcaacatcgtgaacgaagtgcacaccgtgtaccgttcccagggtgtggatatccacgacaagcacatcgaggtcatcgtgcaccagatgctgcgccgcgtcaccgtgatcgattccggtgacaccccgctgctgcctggcgagctcgtcgaccaggcgcgcttcaaggctgccaacaaggagaccatcaagaacggtggcaagccggccgccgctcgtccggagctcatgggcatcaccaaggcctcgctggcaaccgactcgtggctgtccgctgcctccttccaggagacgacgcgcgtgctcaccgaagccgccctgagccagaaggtcgatgacctcaagggcctcaaggagaacgtcatcatcggtaagctcatcccggccggtactggcctcgcccgctaccagaacgccgtggtggagcccgacaaggccatccgcgacacgatctacccgaacttcgggctgggcgcggacatggacggctcgcagaccgacttctccgatgccgacctgtctgatgtggacttctccaacatcgacttcggtgacctgaagctcggcgacgacttcaatcctgacgatttcatcgatgatcagggtgggaacgacttcggcgccgactccggcaacgatctcgtctgagtcctagctctgtcctagctctgtgaaagcggggcccggaaccattgcggtggttccgggccccgctttgtcatatgcgaagcgcgggaatgtctacgggagaatgcatagacgcgaaatactccgtgaaacatcccgtgaaacattctgggtgcgcatcgtcgaatcgattgcatccggtcaaagtcccgtttttccgtcgttggatgggactttcgccggatggtatttcacatgatggacagtgcaatgccgctactggcgctcggtgagttggaagaactggtctccgatacgcagcgtggcgggggcgtcgagttcgcgcggcttgcccttgagcacctgcgcttcctgcccgtcgcggatgatgtaggtgccgttgagggaaccgtagtcctcgatccacagcgtgccgttctgatcgatgctgatcgcggcatgattgcgtgatgtggtacgcgtcggatcctcgaccttctcggccttggcgccttcgggcacgtccatggacggcttgcgtccgagcagcgtgctcttgtcgatgacgatggtctggccggtggcgtcgttgtgcaggatgtatatcttccgtggcgccttggcggtgaaggacgacgacagcaccgtgctgtcccagtcctcgatatcgccgtcggacgagcccttggccgcatggctggcggtggaggatgagacgggggatggttccgccgctgcggaagagactgcggcaggcttgtctaccggatcgtctgcgtaccagcccagctcgggtgccgggggatagggaatcgttgccatgtcaacggctcctttcactgacgtgtggcgagggcggcgttgaccgcggggtcgttcagctgggcgagccagtcgaccagtgccgggtaggtgctggggttacgcgcgatgcaggggcgcaattccggcgcgtactgcgcgatcttggcgatgagctcctgatctgtggtctccagcgccatctgagccgtgtacccgtatggattggtggcttggggctcctgctgcgccgcgtactgcgccgccgtgtactggtcctgtgccggctgctgctgcgcggccgatgccgcatacgaatctgcggaatattggtccgcactgtacgaatctgcggaatactggtccgcagcggcggaagcagcggcggagtcagcggcggagtcggcggcgacatcctgcgccggctgcgcgtcggccacggggccgtcctcggcggtgacgcccatctgcgcaagcgtctgccgcgcgcgctcatcgccgaacgttgccagccaacgcttcaatcccggatagcagcgcgggttcactgccacattggcgccgaattccgggttttcataggcgattttcgccagcaagaccggatcggcattgggatcctgcactgttgcgacggccttgtcataatcaaccatcgtgacctctttccttgatgttcagatttggttggccggtttctggatgcgtatggtgtcaagcgtctcgtcactgaccgtttcgagatcctcctgctgcgcgagcctactggcatgccacaccttctgcccagcatactcgcccgttatgtccagaacaattacggtgacattatctgtaccgcccgcttccagagcgatgcggatcagttcgtcgacggcggtctgcgggtccgcgcatgccgcagcagtggcggcgatggcggcgtcatcgacttcgccgtgcaggccgtccgagcagatgatgaacctgccggtcggtcggaccgcgaagaagtccgggttgatgccgtccgggtcgccgatgcactgggtgatgatgttgcgcgggatgatgacggcatcttccggcagcatctcaccggagtcgatggcctcctgacggcgggagtggtcgcgcgtgatgcgacacagcgtggaggcgtcccactggccgtcgctgtcggcatccatgtgatatgtgcgcgagtcgccgatattgatgacgtaccagtccatgtcggggttgatttcgagcgccacatcgccgggcgcgtcccgttcgattcgccctggcgcgatcagtccggtcaccgtggtgccggacacgccaccgagcttctggccgatggcgagcacgtcggcttgggcgaggtcgatcgtacgcccgatggtcgtgcggctccggctgaaacgtgacgccagtgtctcgaaacgatccaccgcggcgctgctggcccgttgcccgccgacgccgccgcccatgccgtcacagacgaggaacacgccgtcgtcgatgatgaacgaatcctgattggcgcgtcgcctcaggccgatgttgctgtccgctgccacgtgaatttgcatgtcgttcatgactgtcggcctttctgtgaggagggttgccgtgcggatggttgttgcgtggcgggcttctggccagcgggctgtttcgtgggggatttccgcttgacgggccgctgtttggcgggttgccgtccgtctggcttcctcttgtctccgtgccgccatgtacgaatacttgacagtatacgaacgttatggaaaactccgcgcaatgacaggcgggttcgcagcctgcgcatgaaggactgcgaggcgagcatgagcttgcgggtcgtcagtacggaacgccagtaggcgcttgcctgttcgggcgtgaccggctggccggagaacgccgcgtaatcggcttgtcgtcccagcgcaatcagtggggcaccgtcgatgttgagctgccgtgcgatggcctgcgcctggtcgcggcgcgtgccggtgacgggtatgccgctctgcccggcgagcgcgtgcacggcctgccagccggaggtgatgcgctgccgcgcgtcgccgtgccggcgcaggcgggccagggcgacggtcttgagtgcgaggatcagcagacagatcagcagcggtatccataccgggctgccgtagatggcgactttcgccgcgatgcgtccgatggtgctccagatggatgctgccggctcatcggtggcatcctcgccggccagcgccgatttgccgtgtgcctgctcctcgtcgcgcagcgggtcggtgagcggcacgggaggctgtcggaccagcgtctgcgggttgggtggggtgaggttctggttgtcgtcgggtatcttcgtctctttaggcgtcggatagaacgcgacccagccgtagccttcgagattgatctccacccatgcttcgatgtcgttgccggtgaatttgacggtcgaggtgccgttgaccgtttcggtgcggtcgttgctgatgtcgccgtcgtcgttcttgggcaggaagcccatgaccacgcgggatgacaggccgagttcgcgggccatcagcgccatggcggaggcatactgctcgctgtcgccgaccatcgcggatccagcgagcagcgcgttgatgcgatagctgccatgtccgggcagcgacggatagtcgccggtcaggccgtgcgagaaccaaccagaatccttgagctgcgcgaccagcgcctgcgcctgcgcgccggccgtgtcctcgccgcccgccaccgacgaggcgaacttgcccactgagtcaggcacgtccttggtgcccggctggttggtgaccgccgcgttggccttggtgatctccttgtcggtgggtgtgggggcgatgatgccgctttccgtataggtcatgccggtggacagcccggtcgggatgatggccgactgcgtgctctcgttgtagtagaagagcgtgtggccggcggaggatcgggattcgccgccgccgtttccgttggcgcctccggtctttcccgctgacgtgacgtcgacgctgctcgccgctcctgccagcggcagccatttgtcgctcagacccttgtcgatggtgaacgtggcggtgaacttcttgccgtccaccgtattggggatgcgggtgccgacgcgtcggtagtcggatgagtccgaggcttcggtggagtcggacaggttccacacgttgccgtcgaactggtccatcaccgcgagcctgaccggcgtgccctcgggcagattcgtgaccgtgagcagcgtgtcatccttgtggtccttgacgtaggagcgcaggccgctgagcgggcttgcgtaatcgtacgggctgagcggcggatcgtagtagtcgcgcaggatcagacgtgactgcccgatgcccatgcatgcgcccacgcccaggccggccgccagcagcaggatgatcgtggcgctgatccagcgtcccagttccagaagttgccatcgccacgacagccagacgatcatgatgaggccgatgagaacgccggaggctatgggctggaaaccggtctgcgtgcccaacagggcgcagaccaccagttcgatggcgatcggcagcaggctcagcacactgagctgccgtttgtcgccgatggcgaacacgccggcgaggaatgacagccacaggcatatcgtccatgccgccatcaggctgccatcgccggaaccggtcggcggcggtacggcgataaggtatttgaacgcgccgaaggtgctgacgaacccctgtgacagtgtttccacagagggaatcacatggctgatggcggtgtcgttcagcgcgatgaccgggccgatgacgccctgcgcaacgatcaggaacacgatctgccaccacaggcgcagcgcgggtgcggtccctgcataggcgatgagggcgccgagcagggtggccggtacagcggcgacggcccacatggcggctgatccgtacacgtcgagaagattggatgcggcaatcagcgacgtcagcgcgatgacggccacgctgatgaggttcgtgccccaggagcggcgtccgacgcgggcgagcggcagacggttgccgccgcgtgtcagccagatcactgaatgggtggattccgcccatgagccggtggtggtgcccgtgccggtcacggtcgagccgagaccagagaacggacgccgggtctgcccgacctggccgggcagggcgtccacggccgacgtggcggagtccgagccgagtgagctgtcgatcacatcgttcatgcgagcacctccatgatgagcggcaggtcgtcaagcgagccgacggtggccagcgtgaagtccgtgaaatgcttgattgcgcgcacgtcgcccggcgaggtctgcagcacgaggcacgtggcggatttcggcagcgcgagcaccatgcgcttgatatggtcgagctgcttgagcgagccgacggtgaagaagtagaacgagctgtcgggcgagtgtcgcagcgtgctctccaccagattcgggttgtcgtcggtccgcggggtgatggcgctgcaatcgtccaggaaccccatcgggaatttcggcgtgtcatgcgcgctgccggcatgcgtctgcagcggacggtcctgtttgaggcactgcacgcccagcgaggcgtgcacgctcacggccatctcgaactcctcttgactgacgtaatcctgcgggttcacgtcgagcgtcatactcgtgtcggtccgccgcgtcgcctcgtactggcggatcatcagcgtgccggtcttcgccgagctgagccagtgcacgttgcgcacgtcgtcgcccggctcgtattcgcgcagcccgtaaaagtcgaggtcgtcgtcgacgatctgaccgctgggctggccttccagatcccgtgcgacgccggcgttgagcgtgttgagccgcgcgatgttcggatggatatagacggtgatgcgttcggccagcgccttctcgtggcgcaccagcccgaacgggtctcccttgcggatgttcaacggtccgacggtcaggacggcgcgggagacggtggtgaactcgatatcggtctgcttggactggcccggcgccagcatggggatgccgaaccgctcgtgagcctcgcccaacggcaggtcgccgcgtgcggtcgtggtgggggtgcgcccgggattgtcgatgtccacggtcacatggacgtcgtcgccgacggtgacgcggcgacgcgacacggcgatggacgccttgaacccggtattgccaagcgagagcacgatggcgcagaggatcatcatcagcgccaccgcggcgatggcgagcagctcatgccagcgaaccaacgggaatccggccgcgcatacgatgccgatgacgaccacggtccagcccagtggggatatgaacgaggtgaagaatcgcctgaccgcgcgcttgcagcggcgccacaggcgtgccgagctaagccgtcgcctgtggcgcgccgacttgcccgatgcctgttggcctcgctcgttccgtggtttcggcttgcgcggtttccgcggcttctgcggccttgcttcgaatgatgaactgtcgttgtgcctgcgcatggaacgcctttcacgcgccgagcgacggcgccggcacggtctccagcatccggctgatggcctcgtccgtcgtcagaccggcgaaggtggcttcggcggtgagcttgatgcggtgcgacagcacggcgaccgccagatccttgacatcgtccggcaccacgtatccgcgcccgtcggaggccgcccagatgcgcgcgcagcgggtcagcgccaacgcgcctcgcatggacgagccgatggcgatgttctcgtcatgacgggtcgcctcgacgatgcgcacgatgtattcgaggatgttgtcgtcgatgtggatgcgctctccgatgccgcgcagcgcgaggatgtcatcgccggcgagcacgggggagacggtctgcgcgcggtcgcggatgttgacctgccgcaggaggtcgacgcttacctgatggccggggtacccgaccgacgtcttgatgaggaaacggtccatctgggcttcgggcagcttgtatgtgccgagctgttcgatcgggttctgcgtggcgatcacgatgaacggctgcggcacgtcgtgtgtgacgccgtccacggtgactttctgttcctccatgacctccagcagtgcggactgggtcttcggcgaggctcggttgatctcgtcggcgagcacgatggacgcgaataccgggccctcgcggaactcgaactcgccgtgcttctggtcgtagaaggtgatgccgaccacgtcggacggcagcaggtcgggcgtgaactggatgcgcttgaacgacgcgctgatcgagctcgcgatgcctcgtgccagctgagtcttgccggtgcctgggttgtcttcgagcaggacatggccaccgacgagcagggcggtcaggcatagacggatcggatgtgccttgccgaccacgacggtggagacgttcgcgagcagcgcgtcgaacgcctgcttgaagtaggcgatgtcgtcggcgctggccggggtctgcgggttggtgttcgcgacggccgggttcgcggtcactgggcgcgcggctgccgccacgggagtgttcgcggttctggctttgggaaaggcgacgttcggaatcttggccgcgggtgcggtggtcgggtgctgtatggagctcagctgcgtcgcatcgagatcgacgccggtcttggccgggccgttgttcgtggtgttgtcgccggtgtcactgacgggcgagacggcctcgccgttcgtcttgttctgcaccggggactgcgccgacttgttctgtacactcttggcttgtgacggcttggcttgtgccgactttttgcctcggattgccttgccggcagcagcacctccgcggcgcttcggcaacgtaggaatggccacggtcggtgcccccttcgacttgtcggcctcaccaaccgcggcaccgcccctggcatgcggtgtctcggaaatcacggtgccgtcggacaacaccgtttcatcggagacctcagtcccatcgccgctcgctgatgagatggaccgcgctactgtgctcttttccgcgttgccttccgcggtgtcgtttttctcggctgcgttttccccggcactgtttttcactgtgctcggtgcggctgcattcgtcgtggcctcggcggactgagccgtgttgccggacgacaggacggtcttgtccgacaacaccgtcctgtcggacagttgcgtggcgtcgtcgagttcgttgctctcgctcatcgtgatactccttgatgtgtgtggtggacggtgttgtcgtatcggttgatggatggttgataaatcatggtcggtttgaggccagtgtgctgatggatggcatggaaccgaacgaccggcgtcggatgcggctcgggtctacgccatccgtgactgttccggatccctcggccggtttgcgcattccttggacttccctgatgtcgtcggcggtgttcagcgcggagtcggcaccggtcacgctgatgtaccaatacagcttttccgtgtcgatcctgaacgatgagatatcgatgtacccctgcttcgaagctgtgctccatgtgacgttccaatcacttccaccggtcggcttgccgctggtagtggagaacgcgacaaggaccgttgccgactgaccgtagaggttcacgctgccgccggacaccgtgatgcggttacggtctgtcgtgctccacgccagcgtaggcggttcgatcttcgctggggtcttgtatacaaggcccttaccgtcaaatatgatggcttcgctggagtgccccttgaacgactgcgtagctgatacagtgccgcaggtttcccacgggttgatgcggtaagttgcggcggctgaatcgccgttgcctctgtactcctgaccgttggcgaaaatggagagtccgtcatgctcgccattaccgccaactgacacggagcactcgttacctttgagcgtcacctgcaggtttttcggaggctgtatcttgtactgcggcgtcaccttgttcgagtccgccgaagctggtttggcgccgctttgctgcgggttcacggtcgccttgacactgagctcctcataccactgatcgcggctgatcgtatcggtgacggtgtgggtgccgcagggggccgacacggagattgcgccgctcagttccacgctggaacatcccgcgttgtgcatgttgccgagcgtcagcgtggccttcaatgtattgccctttattaccgataggctgaccgtcggcgcgtccgggtcgccccagggcgtcgccgcgttgctggcggcactgggctggccttcgccggcacggttctttcctttgacggtggcggtgtatgaggtgccatcgccggtggcgctgttgtcgattgggaacactagggaattgccggaggtctccttggtgacggaaccgccgcccgaaccggtcagcgtcaccgtgtagctgtccggcttcgtaccgacataatccggaacatcccacttgaccgtcacacgctggtagccggcctcggtggtgaccttcttcggtggatcgggcaccttgtcgggcatggctttgaccgaggtagacggcttcgaccagccgacctcgttcttcgccttgacggtgaacgagtattccttgccgttggtcagcccggtgatctggcaggtggtgaccgcgccgcacgacttgctgccgccgtcccaatcgacctcgtagtcggtgatcgggctgccgttggccgcgcctgcggtccacgagaggttcaccgaaccgtcagccggctgcccggagacgggggagagcagcggcgcgccgggcttgtccaccacggagacggtgatggtgacggtcacctgtcggtcgcgcgaacgggtgccgtcctgcacggtgacgagcacggtgttcgaggatgcgccgatatcggttccggcggtgatgctgatgttgccgttcgaagagcagttcacggtcagcttcgccgaatcgtcggacttgcagctgacggcggtcagcgacgaatccgggaacggattgtaggcgtcggagaacaggtccacccgttcggtcgaaccggccttgagcttcaccgtcttcgcgccgatacgggcaagcgggcggttcgactgcaccacgcgggcggtcatgccggccttgaccgtgccgcccgaatagatgatggtcacggggatgctggccagcgatcccacggtagcgtccttgggggcgctgacggtcaactggccggaggcgctgacgcgcgcggtgatgccgcccgattcgctgccgccggaatatgtgtactgcttctcatcgtcgtatgtgccggcgggggagtgggtcagcgcggtcaggtcgatgatcttcgcatcctcacctgccaccacgtcgatcgtggacgacgagaaggtcggcggtggcacttcgcggccgatgaccgtgatcggcagggtcagcactgcggagttgatgatctgcgtcttgtcgttgcccttgccgtccgccgcggtgaacgtgatcgaggcgggaccgctgtaatccttcggcgcggtgaatttcagcgtcgtgtcgttcacgtagaggtcgccgccatccgatttggtggcgctgaccgattcgggggactgcacgtaagcggtcttgccggcgcccacacgcacatagtcggcgatgttgatggtgatggtctcgcgcgagttcaccttcagcggcggcgccttcggacgcagcgtcggcgggaacacgccgtatgcgggcacttggatgaacgcggtggaggtgatgccgtacgtcgtgttcgttaccgtgtacggcaccgaacgggcctcgtcggtcagatccacggagatgacggtcgacttctcgtcgcccttgaccttcgcgtggtcggtgggcggctcgatggtcgcattcgggtcgacgttgaccgtcaacgtcgcggtgtcgctcaggccggccttatcggcgaccgtgtgcatgatgtagaacgttcccgcctggtcgggcgtggtgaacgagatcatgttgtccttcacgctcgccccggagataccctgtgactccagtttcttcgaaacggtcagatcggtgttgtccccggaaatgtcgttgagcgtcaccggcaccgtggccgccgtgtgcgggcgcagcgtgatctcgtcgtcccgcgcgtacacgccggagtcggacgcgccctggaacacgcccaccctgacctgtgcctgtgcgcgctggccggtccaatcctccaccgcgtaggagaacgtgtcggtgcccgacgagtcctcgtacgcctcgtagatcatgtagttcgcgccgacttcggtgatgcgtcccagttgcggggccttgttgcccaggccgagcagctggtcgtcgtcgccgtccacgtcgatgccggtcagtgtgatcggtatgcgcactttctgacccgaggccacctgcgcctcgacgtcctgcggagtgggggcggccttgttcttggcgtccttctgatgcacggtgatggtgattgtgccggaggccgagttgccgagattgtccttgacggtgtaggtcaccgggaacacgcccgtctgtttggaagcctgataacgcacggtgtcgccggaaacgaacaccagtcccttgaacgtgtccttgtcgtactgcagcttctgctgcagcgtcaccgtggtgccgtcggaatgcgagacatggtcgagcacgttcaccgacacgatgccgtcggtgcgcacctgcgtgttgacgttcgacgccttgggcgcggagttgccggcggtcagtgccggcggctgcagcactatcgtgccggtggatgagccggccgcgttggcgacggtgtacgtgatctccacgggcttggtcggcacctgccgtgcggtcagatacacgcgcttgtggctcaccaggccggtcttgatgcccagcgacgggtcggcatcgaccgacgtgaccgacagcacgccgcccatcggatccacgtcgttggcgagcggttcgacgatggcggtgttgttcgacccgagcagcgccacatcgttggccgcgactggcttggcggatttgcccgcggccggctgcacctcaagacgtgcgaggccggtggacgggatggagccttgggtgacggtgtaaggcacgtaatacgtgcccgtggcggtggccttgaatgtgaaggacaggtccgccgcgttcatggtcgcgctggttttcgcgggcggttccacggtggacagctgcgcgggctgcgccgatgtgccatgcacgtacggcttgaggttgaccgtggtctcggtgttcggtgtggtctgcttgaccacggcgtcgatggtcgccggcagcgtgtttgccgggcggatggagaagtacacgagtccggtgccggtgttctgcccgtcggagacggtgacctgcacgcccactcgccccgaggtggcggaaccggtgttgaacacgagctgcccgtctgcgcgggtggagacgacgacctggtcgctgttctgcgggaccgccgacaccaatgtcatcggatcgccgtcgggatcctggaaactgccgagtgcgttcgtcgtgtacgtggcaccctgctccacgtcgtattcgggcggcgtgtcggcctgcttgggagcgtgattggcggacgagccggtcagcgtgaccgtcaccttggccgtcgaggtctggccgcgcccgtcgctgatgtcataggtgaacgtcaccgtgccggccgaggccgccgaggcgtccagctgcaggtaccggccgtcgtacaccggcgatacggtcatatcgccgcccgccggggccccgactttggtgatctgcagcacggagcagtctgtctgctcgtcgttgcgcagcacgtcgaggatctgttgtccgcccgcgcgggcgccgatctcgtcgtcctgcgccttgatctgcccggattgcgcggaacaggtcttgttgaagttgcgctggttgttggcggactggtcgttctgcttctgctgggcggtctgctcggtctggatggtgttccactgtatcttgatgaccttggtggagtccgaagggttccacacgttgccgtcgaccacgtcgttgagtacggtcaggcggtggttggtgcggaacaccaaatccgacgtggtgctgaccgattgcagcgagccgaattccgggttgctgacgttcggcgagcatacacgcacgtaattgttcgcgctttgcgcccacgcggccgacacgcagccgtcggtggagaccggtttggctgcgtctccggcaccgccggaggtgagcgtgttgactttcttctctcccttgcccagttcgaccaggtacaggccgttcttgccggcggccgcgacccaggactcctgacggccgtccgtgtcggggtattgcagcgtcaacgggctgttggcgccggtgtcggcgctgcccttgtgccagtacagcctgccctcggatgtgacgaccgcggtgccgcccaccacggtgaaatcgtcggcggatacgggcttcccttcggtgagggagctaccctgcacggccttgcctgtcggatcctgcatcgtgagcacggtaccgtcggagggccggtatccgtacacggtgccgtcatgggtgaccgcgatcttgcctccggtgcccagccgcatggacgggtcgctggtggcggggttgacggagttgaggtcggagctgcggccgacccacacgttgccgtttttcgtgttcaggaaggcgatggtgccgccgccggtcaccgcggtcgtgtctcccttggtctccgtcctgccggtggtacccagcgtggcggaggagatgccggtggccttcgcgccttcggtgagcaccgtgtcgctgtcgtgctggacgatgtcgaaacgggctgcagacgaggccaccgccgaatccggttccttgagcttgacgttgaagcgggccgccttgcggttcttgagcgaggtgacccaaacggtgccgtcgtcgagatgcacgtgttggcgggtgatggagctcacccagatggtgccggcgatgatgccgatcagcatgacgagcgcgatgacgggcatcgcccaacggtgcgcgtcaggcgagaccaggcggcgcatggaggagcggaacgcccgctcgcgttggcgctggttaggctgcttgctcatggcatcctcttctctctcgtttgctcgcttctcgtgcaatgccgtgccgcatggtgcagtccttcatatagtgcgttcctattgcctcaccgcgcatgcgatggccggattctgggacatctgcttgtcgctgcgcacgatcttcacttcgatgcaggtctgtttgtcggtcacgtcatgcagctcgactttgcggtcggccacgatgttggtgctggtactggggccggaagtggcagaattgccctgtaccggcgaccatgcgtacatgtcgccgtccttgggctgcgggttcgtccaggtgaacgtgacggtggtgccgtcgtaggttccgttcaggttttcgggcgtcggcaccacttcggctcccgtgatgtcgtcgggattgccgtccgttccgttggagtcgccggtggcgcccggcgtggagaccgatgtgcggttgcgcgttgcggcatcatccatgtgcggcattacgacgaagacgaacgtcaggacgaccgccgtcagcgcagccacgaccacggccgtgatggccagcggcttcttccacgcaccggtgggagcgtccattcgcgtcacgttcgcggggccgggcgcgacgcggcgcttgccggtcatgctgctgggatattcggggacgccttccacggtgacgggcgtggcatggccgtagtaggcctgttgcacctgctgcatcgcgcgggcgaattccagcgccgtgccgtaacggttgtccgggttcttgtcgagccccttggcgagtacacgttcgacgtccgcgggcacatcagggcggccgattggcggcaggcggcgactgacgatgacctgcgcgagttcctgctgcgtatgcgcctgataaccgtgctcatacggcgaacggccggtcagtgtggcgtacagggtcgccgccaaggagtagatgtcggcggcttcggtgccgccgctgcgtccggtcagcacttccggcgcggcccatggcacggagaaaccggtctgggttcccgcctgatacacgttcgtggagatgccgaaatcggcgagcaccggcagtccctgcggggtgatgagaatgttcgcgggcttgatgtcgcggtgcaggatgcctttgcagtgcgcggtgaacagggcgctgcaaagtttgatgcccaggtcgagcatctggtcggcggtgagtggtcgcttgcggatcagctccttataggagccgccgggcgcgtattccagcacgatgtagccaagtccggtgctggtcacgccggcgtcgtggatggaaaggatgtaggggtgcgcggaaagctccgccatgtagttcgcctcattgcggaatcgggcggctgcgcgggggtcgagggtggcgctgctgaccttgatggcgacgtcgcggctggggacgcgctgatggtaccggtatacgctggctgtggcgccggtgccgagtggctggatgaaatcatagccggatatccgcggcggtgttggctgtgccggcatttggctatcccccttacgacatctcttcttcttactctattccgaggtgttcccacgcacaacccttgatggggagcgctgaggagtgctcgccgcaggcaggagctgccgtgcgatgacgcagttagtccagaataaaactgatataaaaacggaacatatggttcggttttcgattgttggcatatgatggaggaactgtctgacggacgacggggccggcgacgggaatggaggtgccatgaaggcggttgaagcactgcttgagggggaatccggcaaggcgctgctggtggttggtgctccttgcgtgggcaagagcacgctggcccgtgatgccttgatggccgggctgcgacggttcggcgaatccggagcgatgatgacggtatccgggcgtcagatcgccgatgtgataggcgatcaggtgattcgcgagctgggggcgacctcccaggcgcgaccggtcacgacgctgtcggccatcgcgttccggctgatcaccgtcatgcgttcgaggtcgggcgagccgctgccgaggttgctgaacggcgccgagcaggatgcgctgctgcgttcggtgtgctccgtccatgtggctcatgtgcgggcgggggatccatgcggcacgtgctcgttgctgcgcgaatacttcgccagggatgattgggacggcgtgctggccgatgccgtggccgggaacgacggcgagggtggtgatgcggattccggcgtaggcgtcaatgccgccttcgtcatgcagctgcgcgacatgttggcccgcatggatgagctgggcgtctccgaggatcgtgaaggaacggccctgtcggcgttgaggcattggtcgccgcgcgtcgagcgtttgcatgtgcagtggcgtctcgcgttcgcgttgcgccgcgaatacgagaccgcggtgagtcgtatgtacccgggcgagtatcggttggactcgtcgcgtctgctggtcgagggggccaaggcggtcgggatggtcggcgatgacgatctgccgcgtctgctggtcgtcgacgactgtcaggacctcaccttcgccgggttcacgttcctgaaggcgctgcgcggtgcggggacgcggctgctgctggtcggcaatccggacgaggccgtgcagaccttccgcgggtcatatccggaatacctgttcgaccagattcgtcgtcagcttggcgccggcatggttcgtctgccggctggcggtgccggaaatggccgagttgaggagcgtgcggtggaccacgtcgacggttatacgtatcgcgatctggtcgcatcccgtatctccctgtccatccgatccacgcaggacgagacggttcctctgccgcagaggccgggcaaattgccgcagctgccggcgagcctgccgattgtcgcattgccccaggccgatccgctgccgggcgatggcagtctgaaaaccgcgctgtaccgctcggccgacgaagagacggaagacgtcgtatggcgcatcaagcaagcccacatccttgaaggacgcaactggaacgacatggctgtcatcgcgcacgacaacgccaccgtgcgcacgatcggcgaacggctgcgtcatgacggcgtgcctgtacggtattcatcggtcacacgaccgttgaaggacgagccgttcgtgcagggattgttcgcgctgctcgaattggcgatgctcaggaaccagacggcgcccgcgctgggcatgaatctgcagcagaccgcactgtatgtgcgctctcgggttgccacggtgatgggatgcccgctggtcagcgtcggcggcggacgggatcatgagggatacccggccaggctggagccggtggacgccgccatgaacgcgttggcatcactcggcaagatcgtcacgtgcgaggacatatgcgagggggatgcgtccgacgatgtgcctggcggtgccgccgacgatgcggggaagaccggggacgctggaattgctggtgacaccgctcgaatgcatgccttgggcaggctcatgcacggatgggagcaatggcgcgaatgggccgtctccgggcgcgatcggaagaccatcaccgacgacacgatcatcgatgtcaaagcaccgcaaggcgacgaactccagttcggcgtcgatgccatgtatctgttgctggaattcgcggatgacgcgcatgcgatgcatggcggtgtcgccggtctaggcggtacaggtgacgttgtcgacgatgccggttccgctgccggggcaggcacgaagggcgcgtccggtataaccgccgatgacgtgctcgccgccgttcaggaggtgtgcgggcggggagacccgcattcccgcgtgtttgcccacctgtggaatctggtgggggcggtggcccaaggcctgagacaactgccggcgaaggaaccacagtatgcgttgtccgtggcttggaacgcgtgcgacgtcgcctcccgttggcagcgcgaggccctgaacaacacggatgccggacgtgccgccaacgaccgtctggatacggccatgcggctgttcgactatgcatccggctcggccgcaagccgggatctgcccgaattcttcgcgcaggtgagggcgatgcgcatcgaagcggattccctggccaaagtggcccccatcgacgaggccgtgacgctgaccacgccggcgggctccgcggggagacactggccgttggtgtggattccggccatccagcaaggcatatggccgaacctggcagcccgaaacacgatgttcggtggtgaggatctggctgatgtcatgctgtatggagggctgtccgatgattccggagagcatggcgacaacaaactggaatccgtgctgtatgcggagcagaaaagcctgctggtcgcgctgacccgcgcatcggagcaggtcacggcaagtgcggtgtacaacgacgatctgaccccgtctgacttcctgtacggatacatgccggaacgattcaaccgcgaacggcatgcgtcggccgaaggacgggaatatacccaggtcggtgaagccggacggctccaaggtctggacgccgatcctcgcggcctggtcgccgccgcccgcgtggcgctcgccgtatacccacgaggttccaaggaatctcaagatgccgtggatgcgctgcgactgctggcaagcaatggcgtcgaagccgctgacatcacgcgttggccgttcctcgacgaggtcgaggatgcgtcttccggctcccgcacggtgggatcgcgggcggcggcttcggaaccggagaaggccgcggagggaaccggccaatcatcggtgccgcggatcgcaacattgtcgccatccgccgtggacagcatctggggatgtcccgtctgttggatgatggaaaaccggttcactggtccgcgcgccggcagtgtggcgacctcgttcggctcgctgatccacgccgtcgccgaaaccgccagcaacgagggcctggacgcggcggactggcgcgatgacctgccgattccggaacgtgtcagcacggtgcgggaccgtatgatcgccatctatgaggagctgcgcgacgatccgacggccaacaccaacccggccgatcaatacaacgcgacgcgcaaggacaataccgcgcatgacgtactgggccacatcgccagctacttcgtcatgtccaacaccgacgaatacccggtaaacaacgtcaagaacttccagatcggtacattggaaagcgcacaatgcgagcgttcgttcattgcggtattcggcttggacgacattcttgccgcctataacgcgatggacggcgtcgacccgatcggccgcgatgaactcgccgccatcatgggatcgctggttggcgggtggcccgaagccatgaacgaccggctgaccgtgcgtctgtccgggcgcatcgaccgtatggagaccagaatcatgcccgacgggaagcgtcacgttcgcctgatcgactacaagaccgggaaagtgccttcgaccaaggccatattcaacgatcttcagctggtctgctaccaactgggactcgcattcccggaaaacgggccgcgcggagccgaagcgctgcaagtcatgccggacatcgcgcaaagtggtctgttccatgtcgcacagaaggatgcgcccgcgacgtccggaaccagcaacgcgcaggagggaatgtaccagccggcgctgttcgccgatggcagtctgaacacgtcatcgttcatgccgcggaaccgctacaagaccctcgataagctttcggatgctcccgatttgattgaagagcctccgaccggtgtaagcgcagcggcatggcgacagttcctcggcatgcgcggcacgcaggccgtatggtcgctctccatgatcgcgagagtgttctacgccgccgcggcgagtcggtcgacccatatacaggcaaggccgaaaccggatcatctccagtattgccgcatgaaagcggcatgcccggcatgcgccggcgaaatcaacaccgtcttcgaaacgaggcagtcatgaacgcaccacgatttaccgacagccccgagcaggcaaaagtcgtcaacgcgcccaccggcgatgacgtgctcgtcgtggccggagcgggcagcggcaagacctatacgatgacccgccgcatcatcaacctcatcgcacagggcgtgccggccgagcgcatcctcggcctcacattcacgcgcaaggccgcgtcggaactgctgtcgcgcgtgtccgccgccgtgctggcggacgggggagacgagcgctttgcgaaccgggcgttcctcaagccggaggtgtcgacgtacgatgcgttcttccagaccatcgtgcggcaatacggcctgcttgtcggcttcgaccagaacacgcagccgctcagccaggccggtgccatacagctggcgaccaccgtggtcggccgtcacatggacatcctcttcgagcaggatctcggggcgttcaagaccgtggtgaatggggtactggggttgtcgcatgccataggcaacgccatgatcggtggcagcacaacaacgatggacgaggccatcggccgtgtgcgggcttgggaccaggcattcctcgcgcaactcgatatcgccattggcgatacgccggttcctgacgaagcgccgaaggccaaggttccgacaaaaaacaagaaggacacggaggagaccttcgcggccaaacaggaggaataccgggcgcaacttcgtgacatatgcgtgtacaagtgtgcacagctgcgcgacgtgacccggcgtcgggagacgctgctgacgctcgtcgaggaatacgagcgggaaaagcgggttcagaacatggaggaattcagcgatttcaccattgccgcttaccagctcgtcgcgcgattcccctccatcggggagcggtaccgtcgccgttacacgcacgtgctgcttgacgaataccaggacacctccaccacgcaggcgatgctcctcgccaccctgttccacccccagtcggctgatgccgatgctgataggtcttcctcccgctggcgggaggcggcgcgcagcgccggagggtggtccaaggatggcgtcgggctgtcgcgatccgcggtgaacgcggtgggagacccgttccagtcgatctatgcgtggcgtggtgccagtcccggagcgttccgcatgttccaaaaggacttcggcatgccctccgacgcgaaaccatacccgctcagcgtcacgcgacgcaacacctgcatcgtgctcagagccgccaacaacctcaccgagccgctgcgcataccgccacggcgggccggcagctccctgatgcgcgaagtggacgtcgcgaacctgtccgcgatggacaacgccgcggaaggtacgatcggcgtgctgggatttgccaccttcggccaggaagtcgatgccgtggcacgcttcgccaaacaggccatcgcacggtaccggaaggacgacgccgccacggccgcctccgataccccgcatgtggcggtgctgttccgaggcaagacgcacatggcgcaattcgcccaagaactcgaacgggcgggcctgacgacgttggtcgtcggctactccgcgctgctggagaggccggaggtccaggatctgatcgcattgctgcatgcggccgccgaccacaccgattcagcgtcgttgatgaggctgctggctacgccgcgattcggtttgggatccgaatcgctcacccgcctcgccggcatggccgaagatctcgacagccaatgccgctaccgtgcactggtcgaatccggcatcataggttcaggttccgatggcgctcgtgccgatgatggtcatgatgaggcaatagcctccacgtccattgattccggtctcgtttcggaagcggatggtggctccggcatcgcgacgttcgccgacccgcaggtgaaggccatcgttaagcaataccgggatcgagtgccgcatgcggtgttcctcatcgatatgatgatgcgggatgacctgccgtcgctgctgtcgcgtcgcggcggattcgacgagacgacatcacgccgtatcatacaggcgggcgaagtactgcagcgtgtgcatgccgtgactaatcacccgctgaaggaagtgattgacgccgcggtgcgggccttgaacctcgacatcgacacaatcgtcgcccaggcggtcaaaaacccctcccagccggtgaaccccacgcaggcgcgttcgcctctgcagtcggtcgccgcactggtcgacacctatacgcaggaaatcgtcgaaggcgtgaatccgactttacgtggattcatgtcatgggttgactcgcttggccagatagaggaggataccgcggcggtgcccgacactcctgcggacgtggtgctgatgaccatccatcaggccaagggattggaatgggacgccgtcgccgtggtgtccatgcaatcaggagtgttccccagcaatcagggcggtttgcatgtcgagctggacgcggagcatcccggcggtggtgccggcgaatcgtggactcccccggaatacaaggcgacggttcgttcatgggcggacgacccggccgcggtacctgcgcccgtgcgcgtcgacgccggtatcctgccacgtttcccgcacgacgcgaatccggatgacgccccggtcgaaacgctgcgtgccctggacgatgtcgaagtcatcgacgacgagttttacggagacctgcgcagcaaggacatcggagacgatatggatgtcgccgacccgtccagctggtatctcacccaggaagaggaatatggccgacgtctgctggctgacgaacggcgactcgcatatgtggcgctgacccgggccaagaaagacgcgctgctcacctacagccagtattcgattctggatcgagacccgagccagtacctgaaccgtcccggcaaaagaccgagcgcctcgaagccgtcggtattctggacggagatgcaggactcgctatgccatgagagcggtctggtatccgcgtgcaagagcgggagcgcgggatactccgaaaatgcggatgccattgccgacagtagccctgacttggcggtggccggtgcggcatcaggtgcgtctgcgcacccgtcgctggaccagctgggtgtggacaggccgcaggggttcttcgtcggcgaccacgccaccgaatatgagcgggatgtcgtcgaagaggcatggaacgccccattggaggaacgcgaacaggccggcggcccgacatggccggccaagttgtccgaggaaaccctgtcgaagctcaccggcgggctgtccggcgattccgggcttgtggccgacgatgcggactccctgctggcacgcgcccgaatgctcgttgaagaccccgatctgatgccatggtccttcggccgaggcgagcgcgagatcgaccgctatgtccgccgtcaggcggagcacctgctggagcatggacggcagaacgtcaccgcgttgcaggcgagggcggggcatatgacccagcgcgaggaacgcggctattggcgtggcctgatccggcccatcccgcgcgtcgcatcccccgccgctgaggcgggcaccctgttccacgcatgggcggaacaattcatcaacgcctacggcgacggccaatcaatagatgcagacggcatcggcgcatacgattccagcagcatcgaaaccggtacggccggcacctgccgcgagccggtgacccgcgaatccctgctgcacgatctgtccgaactggaaatgaaatccgacacactgacggcgaaggaacgacagctcaccgtatggcagcgtcgactcgccgaatcgacgtggtcggagcgtcgcccggcgtgggcggaacgccagattgtcgtgtcgattccccagctcggtgacgtcatcgtcaacggcaaactcgatgcggtgttccacggcggactggacgcgaacgatccgacgaagcaatacaccatcgtcgactggaagaccgggcgcaagccacgcaagccgcaggacatcgaacacaagctcgtgcagctcgactggtatcggctgctgctgtcgtacatcgagcacgtgccgctggacagaatcgacgccaccctctactatctgagtgagcctgatgaaggcgcgcgcgagctgcacgcccgcgcgaaaaccgaacaagagatcctagccgagttgagctccggcattcccgaaggatccgacaatgactaggtgaccgccaagggggcggcacacgctgcggatggaacgcgccgcagccgtcatgccgggagggatgccgcgacccttggcgcaccgtgtgggcgggcacacgtgctggacgcaacaaccacaaaggagcagaaccatggttgcgcacgacaacaccgtcatgaatgccaccatcaccaatgccacgccatccgccgatgacgagagcaccctctcggagagcacgccgatcgggacggacccacagcgtgacgtcatgtctgacgtcgtgcctgacgtcacgccggaggaggtgccgggcgtcacaatcgcatctacgccggcaacggcaacagtgcccgccgaggagatgaaaccatcgcaatcggtgacctaccggcccatgcgttggaatgatctggacgacatcgtccgggagttcgaccgcacatggggtcagtgcagcgcggccgccggcacgccggtgtccatgcagatatcccggcacttcgtgctgcactacctcgaaccgaccacccgcgccatcatcgccgaactcgacggccgcttcatgggcgtcacactgtcgcgcgtcgccggcgagccattggccttcccgcaagccaagcaggaactcgccgcgatcaacggcgaactgaaccggtcgacgctcggcacgaaaaccctgtccgagaccgagcaatggcatgagatggaactgcgcatggaacgcgaaatcgacatcaacgacgtcgcgcgcggcgagatcgagctgttcctcgtcgcgaaaagcgctcgcggacacggcgtcggcggttcgctctggcggcaggcgatggactatttcgcgaattgccaggtcgcccggttctacctgcacaccgactccagttgcgacgtgagcttctacgaccacaaggggctgaactgcatcgccgcccgatacgcggcggaccatcccgaggatggcgcagacatggacgacatcttcatctacgccggaaccccggagaacactcgatgagcggggctcaacagcagagccgatccgtcgcatcgcagtcgccgtacgcgcaactgttccgcattcccggcgccaaggcgttctgcatctccggagcggtggcccgattgccgatctcgatgatgtcgctgggcatcgtgctcgcgctcaaccacatgtacgacaactggacggtcgccgggtcgatgagcgccatgtacatcctcgccgtcgccgcggtcacgccgttctacgcgcgcctgttcgaccggttcgggcagcggcgtgtcggaccggtggcgcttggcgtgcagatagtggcgatgcttgcgttcgcactggcggcgctcgcccgagtgcccatcccggtgctgttcgcgctggccatatgcatggggctgacccagttctcgttcggcgccctcgtgcgcacccgctgggcgtatgcgctgcgcggttcgcaacacgagtcgctgctcaacaccgcgtatgcgctggaagcggccatcgatgagatcgtattcatcttcggtccgattctggcggcgttcctcgccacctcggtgcacccggtgtcgcagttgttcgtgcccacgctggcctgcggcatcgggggagcggtgttcttctcgctgaagaacaccgtccctcccgtgttggagccgattgacgtcgtcgccgccgaaataccggacgcgcagtcgaacgccgtcaccggtcagccggctcccgcactccagacggccggagaccatgccgcaccgacgccctcccccgaagacaacggtttccggctgcgtcgtctgcaccggccctattccgccaagccgcgcaatgtactgacgtatcggggcattctgccactgctggtcgtgttcgtggtgttcaacatgagcttcaccgcattcgacgtgtccatgacggccacgatgaaggccgccggcgcggagcggttcctcggcctgcagctcgccatgttcgcggtcggctcctgcatcggggcggtcatcttcggttcccgggagatgaaaggctcgcactggcggcatatggtcatgttcctgacgctgctcaccgtcggctatgtggtgttccgcatggtgatgggcaatttcctgatcctcggcgtcatggagatcctgaccggcctgtgcgtctccccgctgttcgctaccggcaacctgatcgtcaaggacatcgtgcctgcgcgctcgctcaccgaaggactgtcgtgggtgaccaccgcaggctcggtcggcacctcgttcgggtcgaccatcgccggtgccgtgctggacgcatccagtccgcacatgagcatgatgattccgtggatcgtcaccctgtgcgcggtgccgctcgccctgctcggctggttcctcgcccgaaaacggcgctgacgtccgtcagccatgtacccgccgtggaacgcgatgacgcagaagcgcgtcgccgtgccgtcaacaatcgccttggcatacggcctgcgctcgtacaggctcgcgccggtctgagcacctgagccgacgccgtcaccctcgcccgcgctcctgcgcagatctccagtatctgcgcgaccctgtcgttcacgtccgccttcgtggcaagccggtgttcgagcaacggctcgccgatggaccgcccgatggtcatttgcgggttcagcgcactgtacgggtcttggaagatgtactgcatctgcggacgtatcgtgcgcagttcgcgctgggggagcttgaacaggtcatgtcccttgaacagcacctcgtcgcgctgctcgatggcctgttcgtggcgcgactggtagtcggccatgatacggtcccagttgtcctccgaccacgagcccatctgcactcacggtgtcacctcggaatcctcgcacgtcttgaggacggaggtctttgatgcggatgaccttatctgccattcgacgtttcctttttgacctcgaacgggagtccctgttccctgacgacggccttcaggaagatcgtgaccgcgccggagagggtgagcccgaggtcttcgagcacgcggctggattcctccttgagctgcgggtctatcctcatggtcgtggtgggtatgctcgccatatgcgcctcctatgcttgtcggttgttccgactgtacatcgtatgcacggtgtcatgcggctttccgccaataatccatgtacggtggtgtcatgcgctggcagtcacggcggcggatgcgatacaggcctttgccgagctggcgggcgagcagcccatcatcgtcggtttcgccgaatccgtcggtgaacgcgacgagccattggaaccagtccaggtaggcttgcaggtatttcgttgacacgccgtggaagccgaacatgaaagcctccaatcgcgcatgcagcgtgttcacgcggttgatggcgtggtcgcgctcctgtggcgtcagttcgccaagttccttcctgaccctatcggctatacgcgccaccttgcccgttctcatacctaccatcattgtagctacccagtaaccacgctgcaaggcaaaaagtcaaccttggtctaacagggccaaaatttatgaagccgtatcagtgcgttgtggaacggtgcgccgaaccggtcggagccgggatgtgacccagcttacggacaggtggccggaccatgggccggcatgcctatatattggtagggaattttggaaaagttacggacggtttcgctcggaaaggtcgtgtgatggtcagggtttcagtggtcggcgccaaagggcgcatgggatctcatgtggtggatgcggtgaacggcgcgcaggacatgcagctcgccttcgcactcgacgcgggtgatgacctgatgcggatcacgccggagaacaccgatgtcgtggtggagttcaccgtgccgtccgtttcgctcgacaatgtgctcgcgcttgtgaagcggggggtcgacgtggtggtcggcaccaccggttggaccgatgagagactcgccaaggtcacggcggcgctcgccgaggctccccgtggcgatcaggccgtgttcatcgcgcccaacttcgcgatttccgccgtgctggccgattatttcgccaaggtcgccgcgccgtacttcgagtccgcggaggtcatcgaactgcatcatcccaccaaggtggatgcgccctccggaaccgctatccacaccgcccgcgccatcgcggatgcgcgcaaggcggccggcctcggcgccatgccggacgccaccgagacggatggcggctctcgcgggcaggtcgtcgacggcgtgcacgtgcatgccgtgcgtctgcgcgggctcaacgcgcatgaggaggtattgctcggcaatgctggcgagcaactgaccatccgcgccgacagcttcgaccgcatcagcttcatgcctggcgtgctgctcgccgtgcgcaaggtcgccgacggcggtcatgccggcctgaccgtcggcctcgacaagttcctcgacctgtaaagcgttggcctggcatcccccatccggcgatgatcccgtttggtggggtctggatgggactttggtgggatgaaggaggtccgggacgcgttcatattatgtacgggtgacggcgatgcgtccttgctgccaagtacggtaaagagatatgagtgacggtactatgcatcttctcaacccggctccgttcggacgcatcctccccgcaatggtcacccccatgaaagcagatgggacggttgatttcgaggccgcgcagtctctggcgaagcaattggtcgccgacggcgccgacgggttggtggtgaacggcacgaccggcgaatcccccgtgacccacatggaggagaaggtcgagctggtgagggccgtcaaggaagtcgtggacgtcccggtgatctccggtgccggatcgaacgataccgcgcacaccgtgcgcatggtcgagcagacgcaggaggcgggagccgacgcggtgctcgtggttatgccgtactactcgcgccccagtcaggacggcgtggtcggccattacaaggccgtcgattccgtggccgagaggccgatcatcgtatatgacgtgcccggccgtaccgggctgaaagtccgcgtcgaaacatatgaccgtcttgccgagcttgagcatgtcaaagccgtcaaggacgcgaccggcgacctcgccgccgccgtcgaaaagcagcagcgcaccggcctcgcctggtattcgggtgatgatggcctgttcctgccgttcctgtcgatcggcgccgtgggcatcatctcggtgatcgcgcacgtcgcctcctcgccgatgcgccagctggtcgaggcgttcgaccgcggcgacatccatcaggcgcagcgcctcgccaaccagctcgccccgcttgtccacgcgctcaacggcgacggctaccaggccgtcatggccaaggcctcgctgagaatcaagggctatctttcctccacggccatgcgcctgccgaacatcggcccggacgccgatcaactggccaaggccgaagagggcatgaaagcagcgggactgctctgaccgggccacaccggcctcgctcgggatgcacccggattacggcatcgtccgactccgggaacggccgtcccggtcgcggatgcgaacggcctcggcggacacgggcgagcggttgcagataacgtcgtttccgtgacacagacggaaacaaagaaacagaaaaccaatagagaatggcacaagaacaacaaaagaagaacaattcccgcaggtcccgttccggtggcgcgtcgcgccgccgcggatccgcgaatcgcaacaccagcaacgccggctcgttcaagggccaggccaccgctccccagcaggacgatgtcctgatcgccccgccgaagtaccgcaagggttcgatgcgcatcacgccgctcggcggtctgggcgaaatcggccgcaacatgaacgtaatcgaatacaacggtcacctgctgctcatcgactgcggcgtgctcttccccgaagaggagcagccgggcgtcgacctgattcttcccgatttcagctacatcaagaatcgtctcgacaaggtcgacgcgctcgtgctcactcatggccatgaggaccatatcggcggcgtgccctacctgctcaagctgcgcccggacatcccgctgatcggctccaagctgaccctcgccttcgttgaggcgaaatgccaggagcacaaccagcatcccaccatggtggaggtcaagggacgcgacaagctcaaggtcggcccgttcaacctcgaattcgtcaccgtcacccactcgatccccgacgcgctcgccgtgtacgtcaagacgcccgccggctccctgattgacaccggcgacatcaagctcgaccagctgccgctcgaccacaagatcaccgatctggtggaattcggcaagatcggcgagcagggcgtggatctgctgatgatggactccaccaacgccgaggtgccaggcttcgtcaagccggagacctccatcggacccgcgctcgaccaggcgttcgcgcaggcgagccgcaagatcatcgtcgccagcttctcctcgcacgtgcaccgcgtccagcaggtcgtcgacgtcgcccacaagtacgggcgcaaggtcgtcttcgtcggccgctcgatggtgcgcaacatgtccatcgccgccgacctcggctacctgcacatccccgaaggcaccgtcatcgacctcaagaaggcgcacgacgtgcaggacgacaagctcgtcttcatgtgcaccggttcgcagggtgagccgatggccgccctcggacgcatcgccgacggcaaccaccgcgacatcaccatcaacgagttcgacacggtgatactcgccagctccctgattccgggcaacgagcatggcgtgtacaaggtcatcaacaagctcgtgcagctcggcgcgcgcgtcgtcaaccgcgacaacgcggccgtgcacgtgtccggtcactgcaacgagggcgagctgctgtacatgtacaacatcgtcaagcccaagtgcgcgatgcccatccacggcgagaaccgccacttggtcgccaacggcctgatcgccgtcaagaccggcgtcgatccgaagaacgtggtgctggcggaggatggcgacgtcgtcgacctgtaccacggtcaggccgcggtcgtcggctccgtgccgtgcggctacgtgtacgtggacggcgattcggtcggcgagatcaccgacgaggagcttgagaagcgccgcatcctcggcaccgaaggcttcgtgtccagcttcgtcgtggtcgataccgaggcctccgaagtcgtcaccggcccgaagatcttcctcaacgctgtcgccgaagacgaaagcgagttcgacaagatccgccatcagatcgtcgagcagctgcaggacgcgatgatgcaggggacgaaggacacgcacagactgcagcagatcatgcgccgcacgctcggcggatggatcgcccgacagctgcaccgcaagccgatgatcgttccggtcgtcgccgacatcgcccaggacatcatcgaagaacccagcaagtaaaccgcttcggctcacgcaagtgacgccggcatacgtcccagaagcaagcctgaacgtcaacgtctcagcgaggagtagggaatcgcgtgaacggttccttgttcctttttctgtcgtgacggtcccggcttctttcgggaagacatatcagaaggagttagaaaatatgccaggtgcaaaccttacccgcgtggaagccgaggaacgcaagtccatcgtctccgcccccatcagctaccatgtccagcttgatctgacccgggacgcgcgcacgttcggctcgaccacgacgatctgcttcggcgccgagccgggcagcgagacgttcctcgacctgatcgccgacaacgtgaccgagatcatcctgaacgacgaggcgctcgaccccgcgcaggtgttcgaggacaaccgcatcgcgctcaccggcctgcgccgccgcaacgaggtcaccgtcaaggccgactgcgtgtactccaacaccggcgagggcctgcaccgcagcgtggacccgtccgacggcaacatctacctgtactcccagttcgaggtgccggacgcgcgccgcgtgtacgcggtgttcgaccagcccgacctgaaggccacgttcgacttcaccgtgctcgcgccgaagtcgtggatcgtcacgtcgaacatgccggtcaagtccaaggaggacgtcgacgacgtcatcaccgcagacggggtgctcggcgaccacgagcccgaatccgcccgcagctggacgttcgagaccacgcctatcatgagctcgtacctgaccgccatctgcgccggtccgtacgccgaatggcacaccacctacctcaacgaggacggccgcaccgtgcctatggcccagtactgccgccaggcgctcgcccccgcgttcgccaaggacgtcgactacctgttcgacatcactaagaagggcttcgcgttctacgccaagacgtggggcgtgccttacccgtacgccaagttcgaccagatctacgtgcccgagtacaacgcgggcgcgatggagaacatcggcatggtcacgatccgcgaccagtacgtgttcgagtcgaaggtcaccgacgcgctcgccgagcgccgcgtggtgaccgtgctgcacgagctcgcccacatgtggttcggcgactacgtgacgatgaaatggtggaacgacctgtggctcaacgagtccttcgccgagttcacctccacgctcgccaccgccgaggccaccgaatggcatgacgcctgggccacgttctgctccggcgagaagagctgggcgctgaaccaggaccagctgagcaccacgcacccgatcgtcgccccgatcaacgacctcaacgacacgtacgtcaacttcgatggcatcacctacgcgaagggcgcctccgtgctcaagcagctcgtgtactacgtcggtcgcgagaagttcttccagggcatcaaccagtacctcaacaagtacgcatactccaacgccacgctcgccgatctgctgcacgagctggagaaggcgtccggccgcgatctcaaggcgtggagcgccaagtggctggaggagtccggcatcaacacgatcgccaccgaggtcgaggagaacgcggacggcaccatcgcctcgctcacgctcaaccagaccgcccccgccgagcacccggtgttgcgcccgcatcgcctcgcggtcggcttctacgacgaggatccggccaccggcaagatcgtgcgcaccgaccgcttcgagcttgacgtggacggcaaatccaccgtggtcgccgccgcagccggcaagaagcgccccgcgttcatcctggtgaacgacgatgatctgacgtacacgaagctgcgtttcgacgccgattcgctctcgttcgccctggcgaacctgcagcatttcgatgatgcgctcgcccgcgcggtcgtgtggctgtcgctgtgggacatgacccgtgacggcgatctcgccgccgagaagttcatcgacacgacgctggcgctgctcgccaccgagaccgagtccaccacgttccgttacgcgctgagctgcatgagcaccaccgcgtggcactacaccgcgccggatcgccgcgcggacgtggtcaagcacgtcgccaaggagctgtggaagctcgtcatcgccgctcccggcggctccgaccagcagttccagctcgtcacggcgtacctcggctacggtgaggagggcgacgccgagttcgccgagcacgcgcagggcctcttcgacggctcgctgatcgtggtcggactggagatcgacaacaacttcacgtggacgatcatcaacgcgctctcctcggtgaagctgatcgaccaggccggcatcgacgcgcagctcgccaagcgcgacaccaccgagaaccgcgagttcgcgctcggcgcccacgcggtgcgtggcgacgccgccgcgaaggaatgggcctggaacgaggcgctcaacaacgccgacctgaccaacatgcagctggaggccgtggcccgcgggttcggcgccacgccgcgccccgacctggccgagccgtacgccgccaagtactacgacgtggtcgactgggtgtggaagaacaagagcttccacatggccgaggcgctgcttgagggcctgtacccgtactacgccgacccggccacgctggttgaactcggtcatcggtggctcgccgaccatgaggatgccgacaacgccctgaagcgcatcgtgcgcggcaatgtggaatcctcccagcgcacgctcaaggtgcgcgacttcaacgccgcgctgtaaggcggcgcgaccgacccatacgaaacgcccttcgcgtaacgtgcgcctgcaaggccgccgttcgcgcgaagggcgtttcgcgtgcatgagtatgtaccggcggtgcggcagagtcgtcgtgttgccgtatcgccgtgttgccgtgattcgttgtacaactcccgcatatcagcgaaacgcagatgttgtgcacctacggcgctgtacaactcccgcaaacgggcaaaatatacgtgttgtacagtgacttgagccgcgaaatcgttgatttcaagccattctcttatcgcgcctaaatatctgccgtcgtacaactcctgcataatgcgtaatcgcggacgttgtccagcgtgatgtaccgtgccgtcacatgccgcgcccctgcgactgcgccgttcactgcccgtataccgaaatgttatgggaaaggggtattgctgaaagcttcatgagagtacactttcggattgtagggggttcatcatgaaactcctcggcgatatcatccaaagacggcgtgagccgggaagggcaggttcatggtttctcgttggtcgagggtgaaggccgggtgcgcgttcgcgctggcgtgtgtgttgccttgcgcgtggacgcccggcgcgttcgcggcggatgacgggcgttggccggtggcgaacgatgtggtggctgccgcgtggaagcagggcattgatggttccggtgtgaaggtggcagtgctggattcgcaggcggtggaggattatcccgcgttgaagcatgcctcgatcacatacaagctgggacgattccataacgtggatgacaagacggtcgagtgcaaggtggacggcaagccgttgaccgcgacgatcaagtccggtgaaggcggctactactcctcgcacggcaccgacatgctggcatggatcgtgggtgatggaagcaactacacttcgaagcggcccggaatcatgggggcggcgcccaaagcggacgtgttgcatattacggatggggcggttaatgcggggcctgctgtgacaccttgcgatcagaaactcgcgggtgatgcgacaagcgacagtggtgcagatgtcaagacggcggtggactgggacgctcgcatcctcaaccgttcccagggaggtgatctcgtcagcgcggattatgccgggtatgtggatgccctgcgtcatggggtcgtcatggtcggaggacgtgcgaatgacatgaatcccggcttggatgatctgaccggcgacccgcgcagcatggagaccttccccggtgtggtgatggtgaacagcgtggacgagtccgggaacctggcttccacctcggatgtcatggacggtaatgtggcggtgctgtcctatggcatgaacgtattaggcccggtcaatcctctttcgaatgtatacaatatcgcgggcaatggcggcacgtcgaccgcggccgcggtgttgtcgtcgtacctggcgttggccatgcagaagtggcccgacgcgacgggcaaccagatcatccagtctttgatacgcaacacgaagagcggcaagggcaagccggtcattgacccggaacgcaagcgggggttcggcgaggtggacctgaatgcgctgctgacggtcgacccgacccagtacaaggatgtgaacccgattctggagtaccagatgaaggcggccgcccaatacccggatctgaaggactggtacacgcaggattgcaagacgaacccggacggcgttggcaccgcggcggataatgtcccgtgtgaggccgggctcatcgggcgggagtacgagcgtcagcaggcggcgtggaagaaggtggagcagtgccgttccgatggcggctccgactgcatgcaatactccgcgacgaacaccgccgatggttcgaccaataacaccacgacaccgaacgggcaggccaagcccgaaggagacccgtcgcagagcgcttcgtccggcatgccggtgtggctgtggggcgtgatcggcgcaggcgtggccgctatagccgcgggcgtgataatcgccctggtggtgtctcggcggcgtaggacgcgcgcgcggattcccgtatccggtgtggcatatggcagtgttcgatcatacccaaacggacccgtgccatcccgcccatattctggtggatcacaggggagtgggggccaggctccgcctgccgaaccgggtgccggaacagccacctagccagccgcagcagccatatcctcagcaggtcccccggcaaggattcgctccgccgcaaccatacccgccgactgaaccggctcccggagttccagcccctgacaaccatggtggcaatggaaactccggcggacatggacggcattcagggtaatgaccacagcagagaaagccccaatcggccccttctctcattggcaaatgactcgcgaatctgcttgtattctctcacatgcctttctccgaaactggcaattgcgcgtgatttgggcagtattcatggatatgggtgcaatcgctccgccggccggttacgatggtgctcggtatgtcgaagagacggcggaagccgtcgaagcaaaggaatcgcagattatgccgagattgtttggaaccgatggcgttcgtggattggcgaacagggatttgaccgcgcgtctggcgcttgatctgggggatgccgccgtgcgcgtgctgggcaacagtgccgtcagggaaggcctgccggagggccgccgtcgtgcgctgatcggccgtgatacgcgcgtgtccggtgattttctggcgtccgcgctgtgcgccggcatgtctgctggcggcttcgacgtgatcgatgcgggcatcatccccacgccgggcgtcgcgttcctgacctccgtgctcaacgtcgagatgggcgcggtgatctccgcgtcgcacaaccccatgcccgacaacggcatcaagttcttcgcgcgcggcggtttcaagctgcccgacagcaaggaggacgacatcgaggccgtgctcggtcaggactgggaccgtccgaccggcgcgggcgtcggccgcgtctcgcatgagacggtgaccgccacgaacctgtacatcgaccatctggtgtcgaccatcgccccgctcaacccggacaagacccagcccaagccgttgcgcggcctgaagatcgtggcggactgcgcgaacggcgccacatcggtggtcgctccggaggcgctgcgccgcgccggcgcggaagtgctggtcatcaacgcctccccggacggatacaacatcaacaagaacgccggttccacgcaccccgagcagctgcaggccatggtcaaggccaccgacgcggtgatgggcatcgcgttcgacggcgacgccgaccgatgcctcgccgtggatgaggacggcaacatggtcaacggcgatcagatcatgggcatcctggcccgcgccaagaaggaggccggcaagctcgccgacaacacgctcgtcgtcaccgtgatgagcaacctcggactcaagctcgccctcaaggacatgggcatcaagaccgtgcagaccgcggtcggcgaccgctacgtgctggaggagatgctccgcggcggctacacgctcggcggcgagcagtccggccacgtcatcaaccgcgagttcgccaccaccggtgacggcaccctgaccgcgctcaccctgtgcaacgaggtcgtcaaatccggcaagagcctcaagcagctcgccgcggacttcccgcagctgccgcagcagctcgtcaacgtgccgaacgtcgacaagatggccgccaccaccaacgcggcggtgcaggccgccgtcgacaaggagtcgaagctgctcggcgacaccggtcgcgtgctgctgcgaccgtctggcaccgagccgctcgtgcgcgtgatggccgaagccgccacgcagcagcaggccgacgaggtgtgcgaccggctcgccaaggtcgtggccgacgagctcgcgctgtagaacgaataacggcaataccgcaataccaaggaatcactcgtatgttcggaaaaaacacgaaagtcgacctcgaactcaaccgtgaggtcgaacagctcctcaaaaccggcggcaaggagcgaatcctgccgatcgtgcaggccggcgaaccggtgctgcgccagcagaccgtgcaatactccggccagctgagcaagggcacgctgaacaagctcatcgacacgatgcacacgacgatgctggaagcgccgggagtcggcctggccgccacacagatcggcctggggctcgcgctcgcggtagtcgaggaccacgtgcgcgacgacgaggacgatccgcgcgaaatcgccgaattcccgttccacgtcatcatcaaccccagttatgagccgatcggcgacgcgacccgcagcttctacgaaggctgcctgagcttcgacggatatcaggccgtgcgtaggcgctggctcgacatcaccgcacgctgggccgacgagaacggcaagcagcatgaggagcgtctgcacggttggccggcgcgcattttccagcatgagaccgaccatctgagcggcgaactgtacatcgacaaggccgagattcgcagtctgaccacctacgagaaccttgaggatttctggtgcgacgaccccgtgccgaccgacgccgccgaggaactcggcttcgagctgtaggccggggctgggccgactctggtcgcggctggttacggctaactgctggacaactgccgcaaaagtcgataatgcgggagttgtccagcagacgaacgcgaagaaatcccccccccacgagccgattgcacacgaaccgtatacgtgctttagactcggcgatccatcgcggcggacgagcgcgtcacaataccgccgcgagatcggcgcgggcgtcggggaacgtgcggcagtagcgttctgcctcggcactcagccgctcgtcgacgagcagccgctcgtaaatcggattgcgggcgtagcgtccggatccgtcatcgtacgccgtgacgatgctccgcacctgcccggcccaatcccggccgctgatcgcgcgcagctgggcgatggtgtgcaggtcggaggggtcgtacgcctcgacgatgcgctcgcggtacatcgccctgagctcgtcccaacgtcccagcgcctcgaatgcggcctcgcgcagggattcccactcatacgcaaccagatcctccgggaacatcactgtgtactggttcggccggtcgcgctccaccatgtcgatgaagccgatgagctcatcccagcgctccgccgcgataaggcgcgccgcgtaggcatccgccatggcttccgattcgtggtggctcaccaagaagcggtcggcgtcggccgcatcaccgctcacgcgcatcagatcatggcgcaggaacatgatcgattcctcgaactgctggtgcgccgacagcgccaccgtacgcttgatgagttccgaagcgtcggccgtcgagccggtcgcggcctcggcggcgatgacgccatcgtcgtgtgccgtttcgccgtcgcatcgcccgtcctcgtcgattttcgcctccttggcgaaacgatccatcgtgtcaagggcgctgttcagcgcatcataggcgaacatgcgcgtatcgtcccattgcgcgaacgacaggccacacgacagcagctccaccatctgcgtcgcgttcagctggaaatcctcgttgcaggccacccgcgtgatcagtcgcagcgccttctccccgtcctgcgggtcggcgttgcgcgccacggaatccatgtacacgcgcacgttctggatgagctccttgagatagtcgaagccctcgccgtcccggtccgccgcgttgcccacgaatcgcgcggtcatctcgaccgacttcgccagattcgtggtggcatcgacccagcgcgtgctcatcagcgcgttgccgaccacggcatccactcccgacaacgcctgcgaatcgatgcggaacgtgggcatgtcgttgcgcggcatggacacgccgtcctcggtgcgttcggcggtcggcacggtggatgagatggagtcgaagtaccattgcatcgtcaacccgatcacgtcggcgacctcgttgggagcggcgacgggcacattgttgcggttgtcgtcgtcctgggcggacgcgtcggagatcatatggttccacaggaacgtagggccgtcgaaatccgttgatgccagccagctgtcattgacgaaatccacgacgtcgtcgagctgttgccgcggatccacgctgatcgaggtggttgagccatccatgattctgcctccctggttccgctccgtggttgcaagcgtacgtgtagtctatcgcgattgacgctccgacgtcggcaatggcggataatggagaccgtgagcgaacaaagcgtaaaccatgacgagcggcggcaggcggcgaaaggcgccggcgatgagatgacggctgcggggaaggccgagggaaaggccgcgaggaagaccggtggatccggcaaatcgggcgcgacggccaagcccggcgaacggtatgagcggggcacgcgcagctacacgatgtcgcatatccgcgggaaggacacccgcatcgaagtgctcgtgcgccggtacctgttctcgcgggggcttcggttccgcaaaaacgacaggcgctatcccggccatcccgacgtggttctgcccaaatggcatacgatcgtgttcatcaacggatgcttctggcatgcgcatcagggatgttccaagtattccattcccaaatccaacgtggaattctggaccgcgaaactgacccgcaaccatgatcgcgacatcgcgcagcacgccgcgctcgaatccgccggatggcatgtcatcgtcgtctgggagtgcgagctcgccaagcccgtgcgcgaggcgcgtctggaacggctctacaccgagatcaccgcgcctggttccattggcgtccaatgagcttgctggcctcgccaatgcggccggttccatcaatgcaggcggttccatcgtataattccccgattgccggctccacatccggccatagtcccgtgaacgcccggtgaaacgggactttgccgggagggtggtaggcaattacaatcggtggcagtaccgaatggacggcaaagggtgatgcatgatgagcgagacgaaacagccgacgatgtcacgacgcgcacgcgaggcgcagccgttccgggcaatggtgttcggcgagagggccgacgagatgatcgcccgcagcatcagcgtcatcaagctgagtctgggggagccggatttcggagcgccgcccgccgtgcgcgacgcgatgcgagagcaatatgatggccgcgcgctgccgtacaccgctgcgctgggcctgcccgagctgcgacgcgccatcgccgacttctaccatgaacgccatcatgtcgacatcgacccccgccgcatcgtcatcaccgcaggcgggtctgccgcactgttgctggccaccgcgctcaccgtcgaccccggcgacgaggtgatcgtcgctgacccgtcctacccgtgcaaccgcgaactgatccgctccttcgaaggcgtggtggtggacgtgccgaccagcgcggccacccgcttccatctcaacgccgaactggtcgaccgcgcgtggagcgagcgcaccaaggcggtgatggtcacgtcgccgtccaaccccaccggcacgaccatcgacttcgacgtgctcaaaggcgtgtgcgacctggcgcgattccgcggcgcgtggcgcatcatcgacgagacatacctcgacctcgccgaccgggagcccgacggcagcgaggtcaggtccgcgctgctcgccgacccggacgcgatcatctgcaacagcttctccaagttcttcggcatgaccggctggcgtctcggctgggcggtggtgcccgaatacacgatcgaggcggtcgacgatctggcgaccaactattatctatgcgcgcacacgcccacccagcatgctgcgcttgcctgcttcacgcccgaatcgttggcggtgtgcgaggaacgcagacaggagctgctcgcccgccgccgcatcgtcgtaagtggtctggagcgcatcggcctgccgctcgaagtggttccgaacggcgcgttctacgcgtatttcagcgtcgcgggaaccggtttggacgcgtggacgttctgcgagcgtgcgctggaagaggcgcatgtggcgctgactccgggacgggatttcggcccggcgaccgcggacacgcatgtgcggctgtcctacgcggcgtcgcgcgaggcgttgacggaggggctgtcccggctcggaaagttcgtcgcctcgctgcgatgattctccgataaccgcggccggccttgtgtggaacaccgcgctcatgctgcggccgcgccggtgatacagtgagatgctatggtgaatttgcgttcgcgcgtcactcgattgggcgtgcttgacatcggctccaacacgattcatatgctgatcgtcgacgctgcgcccggcgcgcgacccgatcccgaggccagcaccaaatccacggtgcggctgatgcagtatgtcaaggatgacgggtcgatcaagaagtccggcatcgaggcgattctgaccgccgtggatcagtgcatggaacttgccgaggaatacgacatcacgcaattgctcgcgatggccacgtcggccatcaaggaggctcccaacagcaacaagatcctgcgcaagattgaagagcgcatcggccagagtgtgaccgtgctgtcgggaacggacgaggcccgcctgacgttcctcgccgcccgacgcgttccccaaatccaagcatccggcgcatgccgtgggcacgtcaaagacgttccgctcattggcacgtctggcgggcgcggtgctgcgccagtccgggcgcgaggacacgtggatcatgacgcgcgagcagctggaggactggattccccggcttgcggccatcgagccggagcagcgcgtggcgttgccgggcatcacgccggagcgcacgatgcagatcgtcggcggcggcatcgtggccgacgagatcatgaggtccctgaacgtgcatgaggtcgagatctgcccgtgggcgttacgcgagggcgcgattctgcgctggctcgatcagttcggtcgcacgcggctgggtttctgaccgttgcggtttctgcgcgcagcgtctagatgccgcgccggtgacggggcatctactgctccaattgtgccagctgcgtgcgaatcttatgcagtttggcgtaaatctcgttgcgctgggcggggttcttggcacgctgatgatcacgcgacagcttctcttcggcggctttcagcgtgacgatctggtcccggcgggcgattcgcgcgtccagattggctccgtccgcggaatcgagaatcgcctgcgcgcacagcgaatcccacaggtcgtccatcgtcttcgcgccgccgtcggcgttcccttccggtagttccagcgtgacctcgccggccggcctccattcgccggagaacactttcgtgatcggcacatgaccggcacggaccggcacgttgcggcgcacggccagcgcacactcctcgcgtaccgtgccttcgaactcgccttcgtgcacgcagacgaacacgatgccggatttacgctgtccggcgatcagatcgatcacctcgacggggatgccgggcgtgttcacgcgcaggccaatcaccagcacctcgggcatcttgccgctgccggcgcccatcgccgtgttcgcgggccgcagcagcgcgagcatcgtgatcgaggcgatgtcgttgaccagtcgctgcttgagtttggacgataccggcaccttcgccacgaacaatcccttcggcagcgtgcccttctgctcgggaatcgccgccgaggccggcagtcccagcgtcagggcggatacctcgccgcagtgtgcgacggtcaggtgtgcagcagtcatcatcggcctccttgtgttcgcctccggcggcaggcccgcctgtgcgcattgctccaatcctaaccccatccgggcgcccgccggggatgaccgtcacaaaacggccgtccgtgtgctccccgcgcgaaataccgttcctccgttacgctatgctgtgcatacatcgacgagtcgggcgacgtcgcggacgggtgccgctgacaggggagaaggacatggctttcacggatgaccagctggagagatattcgcggcatctgattctgaaggagatcggcgtacgcggacagaagaagctgctcgccgcgcgagtgctggtcatcggcgcgggcggtctgggatcgccggccgcgatgtatctggcggccgccggcgtcggcacgatcggcatcgtcgatgatgatgtggtggacctgtcgaacctgcaacgtcagatcattcacggcaccggcaacgtcggcatgccgaaggtcgaatcggcggccgaaaccgtcacctccatcaacccagacgtgacggtgaagccgtatcacatacgcgtatctgccggcaatatcgccgagctgattgccggctacgatgtcatcgtcgacgccgcggacaatttctcgacgaaattcctcatcaacgacgcctgcgttcttgccgggaagccgtatatatatggtggcgcgctgcggttcgagggccagctcatgacgtatgtgcccgggcgaggcccctgctaccgctgcattttccgcgatatgcccgcggccggcgaggtgcccagctgcaaggaggccggcgtgctcggcgcagtggtcggagtgatcggcagcatgcaagcggtggaggcggtgaagctgatactcggcgtcggcaagccgctgaccgcccggctgatgacgttcgacgcgctggcgatgacgtgccgtgccgtgccgttgccggagcgcgaacccgattgcccggtgtgcggcgagcatccgaccataaccacgctggatccggcgcgatacatccagccggcgtgcggcgtgtgaatgacggcgattccgccgtttaataacgcgccatcaccggcgtctatcaccacgctgcaacgggagacagacatctggcataggctcatgaacggataccgtgcgcctcggcggccaaaggcgcaaggcgcgcgcaggcgctggcatgagccacgaacatatgaggggagcatctgacatgacggacaagcgcatcgattcaccgctggcggacgacgacggcgatgccatcaagcgcatcacgccggaacgattcgctgagctcgacaaatccacggtgacgctgctggacctgcgcgagcccgacgaggtgttggtccatggccttgatggcgcgatcaatatcccgttcaaccagatcggcacgaggctgagccaggtgccgaacgacaagccggtcgtcgtgttctgccgggtgggggattggagcgagcaggtcaccgagatccttgccgatcgcggctatgacgccatcaaccttgacggcggattccaggcgtatcgggagtatctcgcctctctgccgcaacagcgggagaacgacgtcgacgatggtgatgcccggcccgaaaaacaggcgaagggaagcgccgcgacgctctccatcccgaccgcggcgcagcagatatccctgcgcggccctgagcatgagagcaagtcgacgggggccgccgactcggccgcctcgcacggcagcaatggagatacggacggcgcgcagcctcacgcggtattcgtcgacgccaaagggctcaagtgccccggtccgatcgtgaaggtcgccgacacgctgcgcccgctgccgatcggaacccgactggccgccgaggcgaccgaaggcgccttcctgtcagacatcgcggtgtggtgcgaacgcaccggcaaccatctcgtctcgctcgaacgcgacgaaaacggcgtgattcatgtcgtcatcgacaagaccgcgcacatgccggcccccggcgctccggccgccgcatgcccgtcgtcgccggccggtcgggcggtatcggccgagactcccgccaccgcaccgcagcagaccggcttcaacccggatggcggcgacgtccgccatgacaagaccttcgtcgtgttcagcggtgacctcgacaagaccatcgccgtgttcatcatggcgaacggcgccgccgcgatgggccgcaaggtcacgatcttcttcacgttctgggggctcaacattctgcgcaagcccaagcgcgtgcgtgtcaggaagacgctcatcgagcgcatgttcggcatgatgatgccgcgcggcacgcgcaagctcggcctctcgcgcatgaacatgggcggcatcggcgcgaagatgatccgctggatcatgaaatccaagaacgtggaatcactcgaatcgctgatgaagcaggcgaccgatcacggcgtgcgactggtcgcatgccagatgtcgatggacatcatgggcatccatcaggaggagctcatcgacggggtggagctcggcggtgtctcaacgttcctcggctccggcgagaccagcgacatgagcctgttcgtctgacgggacgcggcgaggccggttgacagtcgccataggtgtgcggcgtagaatacggaaggcgaaggagacccgcatgacacgcaaactcattctcgatttggataccggcatcgacgacacactggcaatcgcgtatgcgctcgcaagcgaacaggccgatgacgtccggctgatcggcatcaccggcacctatggcaacgtcaccgtcgagaccggcatgcgcaacacgctcgccgtcaccgacctgcttgggcatcccgaagtgtcggtgtatcccggtctcgaccgcccgtcgaccgcaccggaaaacttccgctattcgccgtcggcaggaacgcggcgcatccacggcgacaacggcatcggcgacatgacgatccccgattcgcggcgctcgccggaaacgacggccgcggcggatttcatcatcgacgcggcgcacacgtacggcaaggacttggtcatcgtgcccaccggcgcgatgaccacgatcgccgaagtctgccgtcgtgagccgcgcatcggcgagctcgtcggttccatcacgttcatgggcggtgcgctgaccgtgccgggcaatgtgacacccggcgctgaagcgaacatcatgcaggacccggaggccgccgacgccatcctgcgcagcggcgtggaaaccacgatgatcggccttgacgtcacgcatcaggcggtgctcacgcggcgcgacatcgagcgatggcggcggctgggcaccgcggcgggtgatttcctggcgggcatgacggatttctacatcgacgcgtattcggcgacgcagcccgagctgaaggggtgcggcatgcacgatccgcttgccgtggccgcggcgctcgacccgacgctggtcaccacgctgggcatgaacctgcaggtcgacttggagggcgcgtatcgcggcaggaccatcggcgaccgcgctcacgaccggctcaccgactcgcacaagaccacgcaggtggccgtgcgcgtcgacatcgcgcgattcaagagccagttccttgaccggatcacggcgctggcctcccactgatcaccgcgagacgggcggctgctgatcgccgcgcggcgcttgaccattccccgccctcttcccgcgaaagtcccatgtacattggtcgtgatgggactttcgcgggatggcggcggagccgagccgggcggattctagtggtggttgcaacaccaaaaacaccaggtgttgcaaccaccactagaatccgccctcctcatgccgccttggcccgtcctgtcggcggcggtgctggaggtgacgcgcacggggatgtcatgcatgatgccggtcggtcactgttctgcacgcatgctatcgggcgtcgctggaaggtctgtgacgacgatgtcgaaaaatggcgctctcaaaactcgcagagtgacggcaccctttaaaaccattggaaaataagggatttcaacaaccgacactgtgcgcgtgcacacacagagtgacggtaccctcacacagtgacggtaccctcgcacagtgacggtatattcccgaaatatctcgtatggtatggatgcgcggggattgggatccgggcgatagactcgatagttattcaaggatgaccgaatgattcggtaaaccgtgcccgttgatatcagcggtcacggttccgctcgttctgctcgggtcttccagtcgaatgggtgccccggatgcgattcgaacgcacgacacccgctttaggagagcggtgctctatcccctgagctaccggggcaacgaatgaccattatacatgtcgggcggatatgcgcgtatcgtgcgcagtgtgaagcccacaggccgccgcgcatacgtgccggaatggggaatgattctcgggaacgatggcgtccgcggttccggggcgttatcgtatgagcttgtatgcgcgacggctggaagaatacatgtcgttgcgtaccggttgacggacgacaggggagtggcgaatggcaaacgcgcgaggatcatcacggaacgcctacggctcagcggctcggcggtccggcgcgtcgtccggcactgcgaaaaggcccgccgcgaaaacaagcgccccacgcggccgacgccaccgtctccttggcgtcttgtcggtcatattcgccgctctcgcattggcgtgcagcgtcctgcgcatgctccccgaggacctgcaggcgctgccgtacatccccgtgatcgtatccgcgacgccgtggttcgtgattctcgccgtgctcgcgctgatactgtcggtcatctcgcgccgctggatcgccatgctgatggcgctcgcctgcatcggcctccaggtgtggtggcagtggccgttcttcagcgcgtccacgaagctgccggcggccgtcgacgcggccatggcatcgacccgggcggacaccggcgacatgatcgcccgcgtgatgaccttcaacgtctacaaaggccatgcggacgcgaaggccatcgtcgacatcgtgcgggatcagcgcgtcgaagtgctcgcgttgcaggagacgacgaacgatttcgtcaagaagctcgacgaggcgggcatccacagctatctgccgtattcgcaggtttcgtcgtcggacggtgtctacggcaacggcatctggtccgcgaccgagctcaggcgtccggtcgatgacgaggtcgggtcgagcgcgtcgttcatgccgggcggcaccgtgacgttcggcggcggcaaggcccagctgcgattcgtctccgtgcataccaccgcgccgattcccggctactggagccggtggaagcgctcgttggacgagctggcatccatgcgctcgcgcgaaggttcgcgctacgtgttcatgggcgatttcaacgccacgaccgaccacacgccgttccgcaacatcctggggaaccggttctcggacgccgcacggcagtcggggcacgggttcacgttcacctggccgtccaacaagctgccgctgccgcggttcgccggcatcgaccatatcgtgctggacaaggacatcatcgccggtcagatgcaggtcaagtcggtcgccagctcggatcacgccgcgctgctcgccaccatcgtcgtgcagtgacggcggtgacggccggctgatcggggcggtaccttacggcgacgttgtcatgttgtggtaggcgtcggacgatgacggatgccgcgtagtgcgactacggtgcgtggcactacggcggtgcgtcaccacgcatatgggaacatagatggtctcggcacgccatcgttgcgtccataagtgctcgcccaaacgacggctgcgcgcacatatgggcgcaaacctcgtgttttccgtccataagttcgcgcgggcttcgccgtggcgcgcgcttatggacgcaacgtcccgcgtagggtgccccgtcagtccaggttggactgggtgccggcggtgtcggcgctgttggcctgctcggcctgggcggcgtcgagcttggccttgacctcgttcagcaggctctgcgcacgcttggcaagcgcttcgccgatctcccactggcgcatggactggtcgaggttcaatccgccggcctccagcgcctgcacggcctggatgagcttgtcgcgggcctcctcgtacggcatctgcgcgatggcctcgcgctccttgtcggtcaggctggtcgccggctcgctcgccgccgatgcgttcttgctggtcatgatggtctccttctgtcgtgtatgcgtgtcgtattcgattggataacggtcatatatatatggttatgcggctgatatctgccccgcactctgctgccgtgcggcactccgctactgggcggtggcggtgatgacccccttgcgcagcgtcagcgtgagatggtctcccgcgctcacctttccggcgtcgtcgatgacgtgcccgtcggcgttctggacgacggcgtatccgcggtcgagcgtggattgcgggctgagcgcggtcaggctggcatgcagcttctccacggtcaggctggcgtcatccacgatgcgcgtcaggccgatgtccatgcggcggcgcgcgtcgtcgacgaaccgttggtacggctccagcatggtcagcggctgtgtcaggctgggccggttcgcgtacccttcgaccagccgtatctcgttgccgacgcgcgcgtcgatgcgcatgcgcatgcggtcgatggcattgccgatcagctgccactgctcgtgcacgtcgggcacgaccttcttcgccgcgtcggtcggcgtcgaggcccgcaggtccgccgccaggtcgatcagcgtccagtcgtcctcatgcccgatggcggagacgatcggcgtctcgcatcccgccgtggcgcgcaccaccgtctcgtccgagaatccgatgaggtcctcgaacgagccgccgcctcgcgccacgatgatcacgtcgacgtccgggtcggcgtctagccggtgaatcgcctcgacgatggattgcgggcactgcggcccttgtacgaaggcatggacgatgttgaaccgcaccgtcggccagcgcagccgcacgttggtgatgacatcgccttcggcccgtgcgtgcggggcgcatatcagtccgatgcaggaggggaattccggcagcggcagcttgcggtccgcgtcgaacaggccctcgcccttgagcttcatgcgcaactggtcgatctgctccttcagtccgccgccggagccgatcttgcggatgtcgtcgccgatgaagctcaaccgcgtctgcttgacccagatgtcggccttgccatgcacgaccacgcggtcgccctgcttgaatgaggcggccttcgaggcgaacgcccgccagccggacacggatatggcgatgtcctccacgtcatcgcgcaccgtaagatacgccgagccggcgcggcgcgtgttgatctccgtgatctgcccggcgatccacgcggcgggccagcgctccaccgcggtatggaatttctggctcagtacgctgactggccaggggttgtccgcggtggtctcggctgccaggcgcggcagttggtcgaagggcttggggatgcgctccccgccgccctccgatggccgctgcatcgcgattgcaaggtcctgttcctgattcatgtcttcaaggtttacgtacagaaaggacaagtttttctgcctgcgagagcgtcgccgtcggacggtatcattgttggccggcttttcggtgatggtctcgccgcgacacgctgacgacataccgtgaagtaaatcacacggatgttcttttcggctctatttcgccgaaatgtgcatatctaggattgttttcggcgtttccccactatatctaggggtggcatgtcgtatagtcatcagagaacaaacaacttacacacgtgtgatttcggatcggcgaccgccgcaagacatgccgggaatcacgaaaggacagggattaggacatggatgctctgctgatgaacgccagtaccgccacctcctccaaggtgctggtggagaagcgtgacggtcgcgtcgtcgacttcgacccgataaacatcatcagcgccgtgaagtccgccttcgccgaccttgacaagcaggtcggcccggaggaggagaagctgatccgcggcttcgccgaccagatcgaaggcgagatcacggagcgctacaacggtcccgccaagatcgaggacatccagaacctcgtcgagcacgccctgatcgacgcccacctgtacgacgtggcccgcgcctacaccaactaccgtctcgacaaggacatccagcgcgccaaggccacggacgtcaacgaggccgtctcccgcttcatcaaccaggatccgacgctgatccacgagaacgcgaacaaggatgccaacgtctacgccactcagcgcgacctgctcgccggcgccgtctccaaggccgccgcgttcaacatgctgcccccggccgtcgcgaacgcgcacatgaagggcgacatccacttccacgacgccgactactcgccgttcaccgcgcagtccaactgctcgctgcccaacttctgggacatgctcgccaacggcttcacgctcggcaacgcgccgatggcctccccgaagtccatcgccatcgccgccacgcagatcacccagatcatgaaggacgtggcctccagccagtacggcggccagaccgccaaccgtgccgacgagcacctcgccgcctacgcgaagaaggactacgagaagttcctcgaagaggcccgcgagaccatccccgacggcatgccggtggagttcgcccgtcgtcaggtcgagaacgccaaggccaacgagcccgccaagctgcacttcggctcccgcgagccgctgcccatggacacgccgttccacaccgacgtcgacgagctggagcaggagcgtgagatcctcgccaaggtccgcacgcgcaagtccatctacgacgccatgcaaacgatggagtaccagatcaactccaaccgcgtctccaacggccagaccccgttcgtcaccgtcggcttcggcctgggcaccgactggttcgcccgcgaggtgcagcgcgcgatcctgctcaaccgcatccgcggcctcggcaaggaccaccacaccgcaatcttcccgaagctcgtgttcaccgtgcgccacggcgtgaacgccgaccccggcgacccgaactacgacctgaagcagctcgccctggaatgcgccaccaagcgcatgtacccggacgtcgtgttctacgagaatatcgtcaagatcaccggctccttcaaggcgccgatgggctgccgctccttcctgcagggctggatcaaccccgagaccggcaaggacgaggaggatggccgcatgaacctcggcgtcgtttccgtgaacgtgccgcgcatcgccatcgaatcccacggcagcaaggaacgtttctggaagctgttcaacgagcgcatggaggtcgcccaccaggcgctgcagttccgcatcatgcgctgcaagcaggccaccccggtcaacgcgcccaccctgttccgcttcggcgccttcggtcgcctcggcgcgagcggcaacgtcgacacgctgttcaagaacgagcgcgccaccgtgtcgctcggctacatcggcttggccgaggccaccgccgtcttctacggcaaggactggatccgcgaccacggctgggacccgcagggcaaggagttcgcgctgtcgatcgtcaagcgcatgagcgaactgtgcaagcagtggagcaaggccgaaggctaccattactccgtgtactccacaccggccgaatccctcaccgaccgcttcaaccgcatggaccgcgagaagttcggccgcatcgagggcgtcaccgaccacgacttctacaccaactccttccactacccggtgtggctgcagcccaccccgatggagaagctcaactacgagaaggacttcccgtacttcgcgtccggcggcttcatcaactactgcgagtacccgtgcctgcaggacaacccgaaggcgctggaggccgtgtgggattacgcctacaacatcggcatcggctacctcggcaccaacacgccgatcgaccactgcttcgtgtgcggcttccagggcgacttcgagccgaccgacgagggcttcaagtgccccgagtgcggcaactgcgaccctgacaagtgcaacgtcaccaaacgcacctgcggctacctcggcaacccggtgcagcgtccgatggtgcatggccgtcacgaggagatctcccaccgcgtcaagcacatgagcggcgagaccggtcacgtgacgctggcggacggctctgagcgcgagtggttcgaagaggccaagtaactgccggtaccgcgcgttgtgctgtccgcgagggtcgccggtatatgttgtctgacacactcaaggccgttcggccgagcttacggtcagacaacatataccggcgaccctcgctcgttgcgcgcaacgttacggttggacagggaggatgatgatggacaggaagtcgacgctgcatgatttcgcggccggcgagaccggccgcggacccggagtgccgtcatcactgaccaacaacccccgttccggccagtgggacgggcggcgcatgtccaagcgcatgattgccgactacaagaccttcatcgtcaccgacggcgaaggcgtgcgcaattcgctgtacgtctccggttgcccgttccactgcgtcgaatgcttcaactcgtcgatctgggatttccaggccggccacgaatacacgcagaagctcgaagacaagatcgtcgacgacctcaaggcgccgtggatccagggcatcacgttcctcggcggcgaacccatgctgaatacgcccgtcctgttgccgctcgcccggcgcatccgcggcgagttcggccacgacaaagacatctggtgctggaccggctacacgtgggaggagctgatgcgtcccggtgagacgccggacaagctcgaactgttgcagctcatcgacatcctcgtcgacggccgctacctcaaggaccagcacgactccctcctgcagttccgcggatccagaaaccagcgcatcctcgacgtaccgcgttcgctggccgccggcaggcctgtcgtctgggccaagctccacgaccaggagcgcgacatccccgaaatgtacctcaaggatcgcgaggtcggcgagggcgcacaggcgtcgtgacggcgccgccggccttgccatccatccagtggattcgatgccgtcggcctgatcgcggccatcctgacagtctcgcccgccatcggcatggccttgcttctccccgcattcatctggcctcgcgtgagtccgctgttccatgtgatgatgctctgtttccgggaaaggtgctcgcgcatgctgggcaccggattggggcggacgactctgtatatgcgcggcgtgcgggacggcgtggtcgacgttttcgcgggcagcagcgtgcccggtccgctggaggtctcggatactgcggccggggtatggcccgccgtcgtcgccggcgtggccgccatatcagggatttgagcgggactggggtggtcaatagcactggtccataagaccaccagcctgctggcatgctcggctcaccccccgaatgcgcgataatggggggtaacgccgcaatcgtggggaaaccgtcgagtttccgttttgcgtttgttagcgaaatcacgccatacgacggctcgttaggaggggtctcggactacattacataaggaagtagcgggaagtcctgaaccgaagacagaggtaacagatggtggatacagcgaataccgcggccgaaagccacgatagtaagccgttgcgcgtgggtctggatatcggatcgaccacggtcaaggccgtggtgctcgatcagaccaatgcgctcaatgacgtgctgttctccgactaccgacgtcaccacgccaacgtccgcgccacggtggctggactgctcaaggacatccatcagacgctcgtcgacctcggccgcggcgacgagcccattcgtctcgccatcaccggttccggcggcctgacgctcgccgacaacctgcacgtgccgttcatccaagaggtcatcgccgagacccgcgcgatcgacgaggaatacccgcaggccgacgtcatcatcgagctcggcggcgaggacgccaagatcacgtatctgaagcccactcccgaacagcgcatgaacggttcgtgcgcgggcggcaccggtgcattcatcgaccagatggccacgctgctcgacaccgacgcctccggcctcaacgattacgccaaggactacaagaccctgtacccgatcgcgtcgcgttgcggcgtgttcgcgaagaccgacctgcagccgctgatcaacgacggcgccgccaagcccgatctggccgcgtcgatcttcaccgcggtggccacgcagaccatcgccggcctggcttccggacacccgatccacggtacggtcatcttcctcggcggcccgctgttcttcatgtccgagctgcgcgaggcgttccaccgcgcgctcgccggcaaggtcgacgagttcatcgtgccgaccgacgcccacctgtacgtcgcatacggctccgcgctgatcgctggggagccggacggcatcgacgtcgacggcgtgcatttcgagccgcgcacctgtgacgacatcatcgccgccctcgacggcctgaagaacctgccggcgaacacgccgaccatgcccccgctgttctcctccgaccaggagcgcaaggcgttcaacgagcgccaccatcgcgaacacatccacatcggcacgctcgaaggcgcgaaaggcccgcacttcctcggtatcgacgcgggttcgaccaccatcaaggcgacgctcgtcaacgacgaccgcgagatcgtatggtccagctacgccaccaacgaaggcagcccgttgaccgccgccatcaacatcgtcaagaagatccagtccgagctgcccgaaggcgcgtggatcgcccgatcctgcgcgaccggctacggcgagggactgatcaccaccggcttgcacctggacgagggcgtggtcgagaccatggcgcactaccgcggcgccgaaatggtcagccccggcgtcaccgctgtcatcgacatcggtggccaggacatgaaatacctggccatcaccgacggcgtcatcgactcgatcgccgtcaacgaggcgtgctcgtccggttgcggctcgttcctgcagaccttcgcgcagtcgatgggtctgaccatccaggagttcacccaggcggccctcaactccgaccatccggtcgacctcggctcgcgctgcacggtgttcatgaactcgtccgtcaagcaggcacagaaggaaggcgcgtcgatggagaacatcgccgccggcctgtgctattcggtcgtgcgcaacgcgctgtacaaggtcatcaagctgcgtgactccggtgagctcggcgacaccgtcgtcgtgcagggcggcacgttcctcaatgacgccgtgctgcgcgccttcgagctgctcaccgagcgcgaggtgacccgcccgaacatcgccggtttgatgggcgcgttcggcgccgccctgaccgcgcgcatgcattacgaggacgtggccgacgacgcgcacgaccacgacgccgaagtctccgagggccagtccgccgatatggccggcagcgacgatgtcagcgcggagcaagaccacgaggtcgtcatcgacggcgtgcaccacacggcgtccaacatcctgtccggcgacgacctcgacaacatgtcgatgacctccgagcgcgacgtgtgcaagctgtgccagaaccactgcaagctcaccatcaccacgttcgccgacggctcgcgctacgttaccggcaaccgctgcgagcgcggcggcgacgcgaagaagaagcgctccgacaggccgaacctgtacgactacaagtacaagcgctgcttcgcctaccgcaggctcaccgacaagaaggccacccgcggcgagatcggcatccctcgcgtgctcaacatgtacgagaactacccgttctggttcacgctgctcacctcgctcggcttcaaggtgatgatctccggccgcagctcgcacgagctgttcgagaccggcatcgaatcgatcgcctccgagaacatctgctacccggccaagctggtgcacggccacatcaagtggctgctgggcaagggcgtcaagaacatcttctacccgtgcgtgagctacgaggacaacctcgtgcccaatacggacaaccactacaactgcccggtcgtggccaactacccggtggtgatcggcgcgaacatgcccgaactgcgcgaggacggcatccgctacatgcacccgtacttcaacctcgccaaccacgagctcatggtcgaccgcatcgtcgaggagttcgcgtgggcgaacgtgagccgcgaggaggccgagaccgcggtcaaggccgcgtacgccgaggacaagatcttcaagaacgacgtgcaggaggaaggtttcaaggcgctcgcctacatgaaggagcacaactgccggggcatcgtgctcgccgggcgcccgtaccacatcgaccccgaggtcaaccacggcatccctgagacgatctgcgcgctcggcatggtcgtgctctcggaggattcgatctgcgaactgcagccgggggagaacctgcatctgagcgactacctgtcggaaggcgaggaggacccgcgcaagaagaacgcgaacggcttccgccacgtcggcgaccgcaaggtgaccgtctcccgcatgccgctgcgcgtcaccaaccagtgggcctaccattcgcggctctacgcggcggcgcatttcgtggcatcctaccctggtctcgaactcgtgcagctcaactccttcggctgcggcctggacgccatcaccaccgatcaggtggccgagatcctcgccgacaaggccgacgtgtacacgctgctcaagatcgatgaggtgagcaacctcggagcggcgaagatccgcctgcgttcgctcaaggccgccgtcgaggagcgcgaggccaacaagcggcgtctggccgcacaggcccagtcccaatcccgccagcaggtgctgccgaacaagcaggaccagccggtcggccccagtgcggccgagcttgcggcgcagcgtcaggccaaggaggagctcgcggtcgccgaggtgcagctcaaggccgcccaggaccagctcgccgccgcgcaggccgccgtcgaggccgcggagaagcagaagaacgccgccgagcagccggccccgcattccacgggcttccgcaagaccggatccgaggcgcccacgcccggccgtcaggtcatgctcgacacggtgatgaagagcaacccgcagctcaccaaggccgtcaaggacgcctcccgccgcgcggcgcaggccgagtcgcggctcgccgccacctcgccgaacggcaagtccgcgaggaaggccgccaagaaatccggccacaacaccgcgaccatgtcgaagtacgccaacaaggtgccgttcggcaagtcaatgaagaaggactacacgatcgtcggcccccagatgagcccgatccacatgtcgctggtcgagtcggtcatccgctccggcggatacaagttcgacatcctcaagaccgcgagccgcgaggacgtcgaactcggcctcaagtacgtcaacaatgacgcctgctacccggcgatcatggtcatcggccagctcgtcgacgccatcgtcaagggtaagtacgatcccgaccatgtggcgctcgccatcacgcagaccggcggcatgtgccgcgcgacgaactacttcggcctgatccgcaaggcgctgatcgacgccggctacccgcaggtgccggtcatcgcgctgtccacgcagggcttcgaggacaacccgggcttcaaggccacgcccacgctgctgcaccgcgccatcaaggcgctggtcgtcggcgacctgctgctcaaatgcctgatgcgcgtgcgcccgtacgaggtcgagaagggcagcgccgacaagctgtaccagatgtgggacaccatcgtgcgcgagaccatcgagcaccacggcttctccgataccgcgaagaagaagatcggcaagcattacctgccgtaccagacgctgctcaaggagatcgtcaaatcgttcgacgcactgccgctgcgcgacatcccgcgcaaggtgcgcgtcggcgtcgtcggcgagatcctcgtcaagtaccatcccgacgcgaacaaccacgtggtcgacgtcatcgaatcgcaggattgcgaggccgtggtccccggcatcatggagttcatgaccacgcgtccgtacatcaccgactggaacgagaagaacctcggcatgggcggcaacaagaagctgtactcgctcatgcgctgggggctcgaccgttacctcaacccggtgcgcgcggccatcgatctggcgcatggcaagttcagccaggacctgccgatgcccgagctggtcaagaaggcctccgaggtgacctcggtgggcgtgcaggccggcgaggggtggctgctgaccgccgagatcctggagctcatcgagtctggctgcccgaatgtgatctgcgcccagccgttcgcctgcctgcccaaccatgtgaccggccgcggcatgttcggcaagattcgccgtctgcacccggacgcgaacatcgtctccatcgactatgatcccggcgcctcacaggccaatcagctcaaccgcatcaagctgatgatcgccgcggcgaagaagaaccaccagaagctgaccgcggccgactgacggatcagcctcggcccggcgatcagccgaccagggtcgccgcgtaggcgtatagactcttccatggcagggtcgacacgtctatcttgtcggccttgctctgaaccctctcgcggtagcgttccgtgcgcagcgccgtcttcacattggctttcacatcggcgagcggcgccttgcccccgaccccgtccacggtccagtcgtgcgcgtcgtaatactcctgcacctcggtctcgctcgggttcatgcccggtttcgtggcatcgtcgacgtagtcgttcttcagcgcggtcatctcgtagtcgatgtatgaggcgatgtcgtattcgctgcgcccgtagatgacctgccccgcttcacgtttctgccggttgttcgcgttgagggtttccatgcgcttgacgatgccggtgtacgagtcgtcgtcgaccagcccgtacgagactgcgatcaggtacgccgcgtgacggaagcgcagtgtgtcgatagtctgtttcgtcagccattcgaccggcttctctccgccgtatgaggcggtccagtcggcgtcctgggcgttgaggttgacgtcgtgtttctgcttgaaatagctgacggcggcggtgcgctgcgacgaccacgcctgggtgaattcggcctgcgtgatggtggtgtcgccgaaggagaatttcgggaaggcctgcgtcgcgttggcttgcgcgtcgtccgtctttgacgagtcggggctcgccgtgagcgaacggacgagaaagacggcgccgacgatggccgcaatcagcaggatggccgcgacgacgatgatcgcgcgggttctcgtattggttttcgtccccatcttcgcggcgtcacggccgctcccgtccgttgccttgctgggagagcctgatccgcattttcgtgactgcttcatgccgtcatgatacgcggcggacatgattgcggggtgtcgcccgcattgcgcaggaacgcccccacaatcatgtccgtcggtcgtcgccttggattccggttattcctggaatacgtccggatgcttaggatcgccgggctcgtcggccaacaggccctccaatcccaggaactccttccagaattcgagcggctggccatacggcgccgattgcgcgccgcgcgcctgcaggttcgccttcgcctcgaacacgtcctcttcgcggatattctcgaagtagctttccagccgctccctgttctccggcacgtagaacagggacgcgatgatctccgtcagccgctcggcgcgctcgatcggcagcgaatcccaatgccgcagctcgatgaagttcttcatacgcacgtcgttgaaatgcgtggagatgatgtggttgatctcgtacgggttgagctcgcggtcgggatacacctctccggcgttctcatagaacgccgggtgatgcagctccttgccgctcaggctcctggcctccggcgtatgcgtcagatcggcgaacatcagcggcgtggacagcacgtcgatggcgtactcctcccagccgaaccgcttgtcgaacagtccgggaatcacgttcgtgcgctgggggtcgagatagtcccacatgcgttggcgtagcaggggccacgggttcggcgtgccctcgaaatacggcgtattgcggaagtaccaggcgaggatcggcccgatgatggtgcccagacgcagcttgtcgatggaatcctgctcgtcgacgtagtcgatgctcacctgcgtggaggccgagcaccgcatcatgcacgggccgaactggcctacccgccccaggtagcgggtcatggcgtcgtaacggtccttcgggttgaccttgacgtcggcgaagctcgacttgggctggtagccgtaattgaccagacggaagcccagctcgtccagcacgggatcgatgtcgcgccggaaggaacgatacagcgtcagcagttcctgcggcgtcttgaggatgcccagcgagcactccacctgaccgccgggctccagcgacacggcgattccttcgcgcccgagtccgaccagatggccgttctcccagtactctttctccttgtcgtagtacggcgcgatgcgcttgagcagcgtttcgacgccgttctcctcgtagtagctgacggcggtgtcgtcgccgttgtgcaccggaagatgttcgatctccacgccgaaaccgcccgtgccgcgtttggaacggccttcctcgaagaatcgcagcagactgtcgatgtgcttgggattcggcttggcgagcagatgcgcgtaactgattctcggtgtcgtcatggggcatatcgtacctgcagattccatcggccacagcggtgccgttatacaaagaatcgatagccggtttgcgtccgaatgctggacattgcgactgatttcccgggttccgttcagggggtacaagggtgacgttatgacagttaacgaaatgccgaatacgccatagccccattgccgtagcctatgggtaccgctatacttgtgaacttgtaaagtctctttacatattggtggtgtggcgagtctgtgaatgaccccggaagggggcatcgtcatggatgaccggatcgccgacatgtccccccgcaacgaggaggggaacggagactctccaataacagtaaggacaacgatgaaacctcatgtaggatcacggatgatcgcagcagcggtcgctatggggacggcgttcgcgttgatcgcgccgtcttcggcgctcgcggccgatgcgacgccagcggcggcgtcgaccggaacgacatattacgtgtcatcgacgcatggcgatgacggcaacgccggcaccgatcagggccatccctggaagacgctggacaaggtcaacgccatcgcgaccgaccttaagccgggcgactccgtgctgctggagcgtggctccacgttccaggaccagtatctgcacatcaaggacacgtcgggaaccgccgacgcgcccatcaccatcgccgattacggcgacgcctccgccaagccggtcatcgcggcgaacggcgtcaagggcagccggtggtaccagaactaccgtgcgtcggtcggcaaccaccagaacaagggcaccgtctcctcggccatcctgctcaaggacgtgtcgtacatcacggtgaagaacctggagatcaccaatgacgaccccgacgtctacgacccgatcgacacgtggaagtggaccgacacggccgattcggatggcaccaagctcgaccgctcggccgaccgcatggaccgcaccggcgtggccggcatcgcggagaacggcacaacgatgagccatgtcacgcttgagggcctgaacatccacgacgtggacggcaacatctacaacaagcacatggccaacggcggcatctacttcatggctcactacgcccgcgagaacaagaacgccgcggacaacacgtggctgcagaaccacatctcgcgcttcgaccacatcaccatcaagaacaacatcgtcaaggacgtggaccgctggggcatcgccgtgggctacaccgcgtacctcaacttcatcgacgcggcgtggggcgacggcagcatcgacgacgacctgatcgccaagtacggccagaccaacgtgaccatcgagaacaactacgtcaagggtgcgggcggcgacgccatcaccctcatgtactgcgaccgtccggtcatccagtacaacgtgggcgacagcgtctcgaagcacatgaacgacgtcgactacccgcatgatgccgcgcacggcggcaggtacggcggctgggtcgcggcgggcatctggccctggcgctgcaaggacccgatcttccagtacaacgagatgtacaacaacctcaactccgaacacggcaacggcgacggccaggcgtgggacgccgattacggcgacggcacgctgtaccagtacaactactcgtacggcaactcgttcgcctcgctgatgatctgcaaccagtacgccatcaacacgacgttccgctacaacatctcgcagaacgaccgccgcggcgtgttcgacctgccgggcaacggtccgggcaaccacatctacaacaacaccgtctacatcggtaaggacagcgcggtgctgaccggccgatccaacagccaggcgaagttcgagaacaacatcttcatcaacgcggccgacaccaagaagaccgagacgtggaaccgcggcaaccagcacggcggccagacgtacgacaagaacatgtacgtcaattacgcgaacaggcccgcctccgattccaacgccgtcgaggtcgccgatgtgaagaccgtgctggccaatgccggacacgcgccgagcgcgccgaaggccgacggttcggtctatggccgttccggcagcgagttcgacggatacaagcccgttgacggctccccggccatcaatgccggcaaggtcatctccgacatgaacgactacgcggtcacgaacgacttcttcggcaacaccatcaagggaaccccggacctgggtgccgtcgaaagcaacgtgctctccgtctccggcaaggtcaacgcgtacgagaccgccacggtcggcggctccaaggtcgtctacgtgccgttcaccgcgaagaacccgaccacagtcaagcagcttcgcgcgggcctgacggtcggtgacggatcagtcgccaacgtgtaccgcggcggcaacaagctggcggccgacgcggcgatccagtccgacgacgtgctgcgcttcgaggtcgaaggcacttcaaacacgccgatcgaatacaccatcgctcagaagaacgcctggaactgggtcgactggttcaagaccgccacgggcgtggtctggaactcccagaagcagaatggcgccgacggtgactggacggacatcacgacgttctccaccgagtacccgatgtcgaagtacaacgagtactacggcgcgggactcaccggcaacctgtcggacctgccggcggtgggagctgaccgccccgggcgtcagggcctgttggtcgacgacccgggtgcggccggcggcaccgccatcgtgtggaaggccccgaaggccggcaccgtgaaggtcacactcggccgcgacaacgagccgcagcggcgcaacgccaacgcttcgggcacggtgacgctcgcactgaccaagaacggcgagacgctgtgcaccgcagacatctccaccgcgcagaccaagaacgacgacttcgtcaattgcctgaaatcggataagggcacggtgcaggtgaacgccggcgacgtgattcgcatcgcggcgaccgcggccagtgacgcggccgctccggacctgtacgtctcgccggtcgtcacctatcaggatgtggcacccgtcgagtcccagacggcgcagtatgctgcctcctacgacgcggtgagcgccaaggtcggcaccaaggccaccgctacggtgaagttcacgaagggcggcgccgccgccaccccgaccggcgtcaagtcctacgcgctgaagaccgcggtcgacggcgtggccgtggacgccgcgaccggcgcggtcacctacacgcctggcgccgatgcgtacggcaccaccaagaccgcgaccgtggtcgtcacctactcggataacaccaccgacgaggcgaccgtcaccttcaacgtcgagaagtccaacgcgcagaagtacaacgtgctgtacccggccgtgtccggcggcgcgggcgtcgcgctcaagcgcacgcccaagttcacgctcaaggcggacagcgccgcggcgtccatccccgccggcaccaagttcgcgctcggcacgggcgccccggccggcgcgtccgtgaacgccgccaccggtgaggtcacgctgaccagcacccaggccggcaccatcaccgtgccggtgacggtcaccttctccgacaccaacgagtccatcgaggcgacggccacgttcaccgtgaccgctccggcggcgctcggcacctccaagctggagaccggcaccgcgaacggcgcgaacgtcatctatgtgccgttcaccgcgaagaccccgaccaccgtcgccgatctgctggccctggtgaccgccgagccggattcggccctcaaggccgtgtaccgtgacggcaccaagctggaggacgccgcggcagtaaaggccggcgacgtgctgcgcttctacgccgacggctccaccttcaccgccgactacacggtcgtgcagaagaacgcctggaactgggtcgacgacttcaagaccgactctcagggcccgatctggacgtcgcagcgtcaggtgtccggcaaatggcagacgattaccgatttcggttccgatgtgtacccgcagacgtactacgacaagtactacggcgtcggtgtggactatcagaacaagaaccttccgaccaaccgcagcgccattcacggcctgatcgccgacaatccgggtgattccgcggcgacggcgatggcctggaccgcgccgaaggccggttccgtgaaggtcacgctggacaaggtgaccggagcgcacgtcgagccgtacatccgtcagtcgggcagcaacggcaaggatgtggtcctgaagctgctgaagaacgacgaggtgatctgctccgcgacgatgaccgattccttcgcgacggcgaccgggttcaacgaatgcctggcatccgccaagggcacggtcaaggtcgcggtcggcgatgtgctgcgcttctcggtggatgccgcgaccggcacctccaagtcgtcgatccacatcagcccggtcatcacctacacggatgccgatgagccttcgcccgagcctggcctgtcggagcagtatgctgcggcgtatccggcttcggttgcggcgaaggtgggcgagaaggccaccgccgcggtgtcgttcacgaagggcggcgccgccgcggatgccccggcgggcacgacgttcgcggtcgcgggtgacgggttcacggtcgccgcggacggtacggtgtcgttcacgccgacggacgcgcaggcgggcaagacggtgacggccacggtgacggtgacgtattcggacaagtcgacggatacggcgacggtgacgttcaaggtcgccgccaagaccgagcctgagcccgagcctggcctgtcggagcagtatgctgcggcgtatccggcttcggttgcggcgaaggtgggcgagaaggccaccgccgcggtgtcgttcacgaagggcggcgccgccgcggatgccccggcgggcacgacgttcgcggtcgtgggtgacgggttcacggtcgccgcggacggtacggtgtcgttcacgccgacggacgcgcaggcgggcaagacggtgacggccacggtgacggtgacgtattcggacaagtcgacggatacggcgacggtgacgttcaaggtcgccgccaagaccgagccttcgcccgagcctggcctgtcggagcagtatgctgcggcgtatccggcttcggttgcggcgaaggtgggcgagaaggccaccgccgcggtgtcgttcacgaagggcgccgccgccgcggatgccccggcgggcacgacgttcgcggtcgcgggtgacgggttcacggtcgccgcggacggtacggtgtcgttcacgccgacggacgcgcaggcgggcaagacggtgacggccacggtgacggtgacgtattcggacaagtcgacggatacggcgacggtgacgttcaaggtcgccgccaagaccgagcctgagcccaagcccgaaccgaccgatccgaaggccgacctgcgcaaggaggtcgaatccgcgtcgaagcttgacgagaaggactacaccgccgactcgtggaaggtgttcgccgcggcgctcgataacgccaaggccgtgctggaggacaaggacgccaccgaggcgcagatctccggcgcgctcacgacgctgaagtccgccactgccgcgctggccaaggccggcgacaccggcaagcccgacgatggcgacaagccttccgcgggcaagcccaacgacaagggcgacaagggcaacggtctgtccaagaccggcgccagcgtcgccgtcatcggcgttgccatgctgctgctcgcagccgccggcttcgtcacggtgaacgtcgttcgccgccgccggtaacggcatgacgggcacccgcccgtaacaagcaatcaggggtctcatggtcagccatgagacccctttgctatgcctgttagccgctctctcgctgtcgattaccctatattcccgcgaaagtcccatttgcggacgctggaatgggagtatcgacggatgggagcaattgttcaacacgccgattgttgtatatgcaactgttgtatatggtatgcattattatgttatgttgcctgaatgttcggaatgcgattttcgcatcgacagacatggtatggaggggtatggagcaacgtattctcagcattgaaatacgggcggtgagtaaggccgtcgaccgttatttgggcgaaagcatgccgctctccgccaaggggaccaccggcggcaacgcgcatatcatcatgttcctggcgcgcaatcgggatcgggagatctatcagcacaccatcgagcagaaattctgcatcacccgttccacggcatcccgcgtgctggcgctgatggagaagaacgggctgattgcccgtgaatccgtggcgcacgacgcacgatgtaagcgcattgtgctgacggataaagccgacgccatcgtcgccgatctcaaagcgaacggggagcgtgtggagcgtcttctggtcgacggtttcacgcaaacggagcaagatgcgctgcatgactacgtggagcgcatgcgtgccaacatcgagcgcgcacaacatgaatttgaacatcagacatcctcccagacgccgtcaacggcggctcccgaatactcggaagcggaggtcatcaacacgaaggaggagaacaagtgagcagcaccgaagaagcgattgcgcaagcgcgcaaagccgtggaaccggacaagccgaaacatgtcctgcgcacgctgggcaagtcgatccgcgagtacaagaaggccagtctgctggccccggcgctcgtggcggtcgaaggcatcctggagatcctgatcccgacgatcatggcctcgctgatcgacgagggcatcaccggcggcagcatgccgtccaccatcaagttcggagtgatcctgctgatctgtgcgatggtctcgctgggtgccggcttcctgtccggcaagttcgcggccatcgcgggcgcgggcttcgccaagaacctgcgccaggaccagttcaagaaggttcagggcttcagcttcaccaatatcgaccggttctccaccggctcgatcgtgacccgactgaccaccgacgtgacgaacctgcagaacgcctacatgatgattatccgtctgggcgtgcgtgccccgatcatggtgattgtggcctggatcttctcgttccgcatctccccgtccatctcgctggtgttcctggcctgcatcccgatcctggcgatcggcctgtgcggtctggccgtgctcgtgcaccccgtgttcgagcgcgtgttccacacttacgacgcgctcaacaacgtggtcgacgagaacctgcagggcatccgcgtggtgaaatcctacaaccgcgaatccttcgaggtgggcaagttcggccgcatctcccagcgcatcttcaaggacttcaccaaggccgagcgcatcatgagcttcaacagcccgctgatgatggtgtgcgtctacgcctcgatgatcctcatcgcatggatgggcgcgcagcagatcgtcgcctccggcaacaacgccgccgtgggcctgaccaccggcgacctgaccgcactggtcacctatgccatgcagatcctcatggccatgatgatgctgtcgatgatcttcatcatggtcattatctcccaggcctccgccgagcgtatctgtcaggtgctgcaggaggaaagcaccgtgactgatccggccagtccggtgactgacatggccgatgggtccatcgaattcgaccacgtcaccttccgctactccgacagttccgaaaagcccgtactcgacgacatcaacctgaagatccgctccggcatgaccatcggcatcgtcggcggcaccggttccgccaagtcgagcctcgtgcagctcgtgccgcgactgtacgacgtgagctccggctcgctcaaggtcggcggcgtggacgtgcgcgattacgatctggaagccctgcgcgaccaggtggccatggtactgcagaagaacgtgctgttctccggcaccatcgccgagaatctcaggtggggcaacccgaacgccaccgacgaggaggtccgccacgccgcgcagcttgcgcaggctgacggattcgtgcaggaattccccgacaagtacgacacctacatcgagcagggaggcaccaacgtctccggcggccagcgccagcgcctgtgcatcgcccgcgcgctgctgaagaagccgaagatcctcatcctcgacgattcgaccagcgccgtcgacaccaagactgacaagctgatccgcaacgcgttccacaacgagatccccgacaccacgaagatcatcatcgcccagcgtgtcgcctccgtcgaggaatccgacatgatcctcgtcatggacaacggccgcatcatggcgtccggcacgcacgacgagctgctcgccacctgcgatgaataccggtccatctacgagtcccagaccaagaaccaggcccgacccgaggagctggtcgccgcggagccggccggggcgcaatctgagaccgagaccaaggaaggagagacgcgatgagcaacgaccagagcttcaagaaccgcaaacccggcatgggcaaagccgaacctggcaccatcaagcgcatcttcagctacatcttccaatacaagtggcgcgtcgccgccatcgtgatctgcatcctgatcggcgccgccgcgcaggccggatccgcgctgttcctccagtccctcatcgacacgtacatcctgccgatggtgggggagacaaatcccgactgggcgccgctgctgcgcgccatctcgcttatgggctgcctgtacctggccggtatcgtggcgtcctgggcctggcagtggctgatcgtcaccgtcgaacagggcacgctcaagaagatccgcgacgacatgttcgcccaccagcagaagttgccgatccgctactttgacagccatgagcacggcgacatcatgagccactacaccaacgacaccgatacgctgcgtcaggcgatctcgcagtcgttcccgcagatgttctcctcgatcatctccgcgctggcggcgctgctgtccatgctgtggctctcgatcccgttcaccgcgttcgtgatcgtgttcaccgtgctgctctacttcatcgtgcgcaagatcgtgagccgttccggccgctacttcgtcaagcagcagatgtggatcggcgacgtgaacgccttcgtggaggagtccgtcaacggccagaaggtcatcaaggtcttcaaccacgaggacgccacgcagaagaccttcgacgagaagaacgaggagctgttcgaggcatccgccgaagcgaacacctggggcaacgtcaccatgccggtggtcggcaacatgggatacctgctctacatcctgctcgccatcatcggcgcagccgtttcgttgtccggcgtcaatgatctcggcctgaccggcgtcaagccgctcaccctcggcaccctcgtctcgctgctcaccctctcccgttcgttcatcaacccgatcggccaggtctcccagcagctgaccatggtgatgatggcgctcgccggcgcctcccgaatcttcaagctgatggacgagcccgtggagtccgacaacggcaccgtcacgctcgtcaacgtcgagctcggcgagggcggccgtaccatgcgggaggtcgaccacgagaccggccactgggcgtggaagcgcgaggaaggcgacgacggcacgaggtcgctcaaggccgccgagaaactgcacggatccgcgcgcgaagtggccgtcaaggccaaggagcaggcgattacctcgccggacggccgctacacgttgctgcgcggcgatgtgcgcttcaccgacgtgaccttcggctacaatcccgataagccggtgttgcacgacatcacctggttcgccaagcccggtcagaagatcgcgctcgtcggtgccaccggtgccggcaagaccacggtgaccaacctcatcaaccggttctacgacatccagcagggccagatcctctacgacggtatctccgtagccggcatcaagaagccggatctgcgccgttcgctgggcatcgtgctgcaggacgtgaacctgttcaccggcaccgtgatggacaacatccgctacggccgactgaacgccaccgatgaggaatgcatcgaggccgcgcgactggtgaacgcggacggcttcatccgcatgctgcccaagggctaccagacggtgctcgaaggcgacggctccggcctgtcccagggccagcgccagctaatctccatcgcccgcgccgccgtggccgatccgcccgcgctgatcctcgacgaggccacgtcgtcgatcgacacccgcaccgaggaggtcgtgcaggccggcatggacaacctgatgaagggccgcacggtcttcgtcattgcccaccgcctgtccaccgtgcgcaactccgatgtgatcatggtgcttgaccacggcaacatcatcgaacgcggctcgcacgacgacctcatcgcgcagcgtggggagtactaccagctctataccggcgcggtggaactggagtagccaaggactgccttcggcagaccgtcatgtttcctcggcactgtcgtgcctcggcgtcgcctatggacagcccaccggacttcccgcttaacggctccgcagctagtggctgatattccagtcgctggcattatccgcgaaagtcccatccgaacatgtcggaatgggactttcgccgggtgggggaggagtggccttccctacccggcacgataattgggggtgtgcgccacgcctcagtttgccaggtagttggcgatcgcgccggcggcggcgtagcctttgcggtacatgagttccagtccctcgaaggacttgctcagcgtcgagagcccgcacaggtcatcgggcgcgaggatgagcacgcggccgtcgcgctcgtactccttggccaaggcaacctcgtcgttgtaggtggcgtatcggttcagcagtcgctcggcggcggccggataggaatgccgaaggattcgcgccggcgcgatgtcgcgcttctgctcgcgcagcacgtccttcggccttgtcagcaccagcacgatgcggtcatatccgtcgtcaatggccttctgcacggggaccggatcgacgatgccaccgtcgaaatacgggacgccgtcgatcacatacggctcgcaggccacgggcacggccgacgaagccttcatgatgttgaaatcatcgtaatgcacgtcggacttgtcgaagtacttcgcggaaccgtccaacgcattgcacgcgatcaccgtgaacccggtggggttcgccgcgaacgcctcataatccaccggatattcgccgtcgtgattgctcagcgtgctgtatacgtaatccagattcgcgaaattgtggtgcttgacatagctgtcgaagctggcgtattccttgcggaaggcgtattcggtgtagaacttgtggttgcggccgtgctggccggcgaggaacgacaccatgttggcgctgcctgcggagacgccatagcagtggtcgaacgtgatgccttcctcctggcatcgatccatcacgccggctccgaatatcgcgcggaagcctccgccgacatcgatcagcgccgtcctgtgcgagggtttcgattgtgcggatacatcactgcgctgtgtgtcggtgcgttgcgattcgaccgtctcggctgcacccgcgtcccgtgcgcccgtatccgcgtgtgccgtggccttgtgaccgttgtccgtcgccttcaccgtcatcgtcgtcccctttcgtagtgtcgtccaagtgtacgcccgttatgcggacaatcacggtgtctgccagggtcgcccgatctagctgtgcagcagttctcgtgacagcgcggcgatgcgttcgccgctatcggaattcgcgatctcgacgccgccgtccatctcctcgggagcaagcttccccaacgattccagaaccatgcccagatgccggaccgttccgcgattgccgtcgataatcgcggtcgtcgacggcagcagctcacggaagtagtcgcggtagaacacgaaatgcgtgcagccgagcaccaccgagtcgatggacggaaggtcatagccgtcaaaataccggtgcagggtgcgcatcaccaggtcatggtcgcaaagccttccgctttcgacgatttccaccagatcggggcatggctggggcgaaatcatgttgttcgccttgaaacggtccatcagtgcggcgaacttgtgctcgcgcagcgtcagcggcgtggccgcgacgatgacgtgctgcggcatgtgtcgtgcaggtgcgggcccgtctcccgcggcggtgtcgccccgatcgcaggcgaccttcagcgcaggctccatgccgatgatcggaatgtcgtaatggtcgcgcaacgcgttcaccgccgcggatgtggcggtgttgcaggcgatgaccaccgccttgaccccctgactcatgaacctctccatgatgtcgaagctcagccgacgcacctcctgcggggtcttcgtgccgtatggcgcgttcgcggaatccccgaaatacaggacccgctcgtgaggcatgtcctgcacgatctgtcgcaccaccgaaataccgcccaagccggaatcgaatacgccgatcggtgccgtcgaagtcatgtcccatcgcctttccaacgtctagcggccaagccttcctgccgggaggccgtgtcatcgaacgcccccatactatcgcacaccgttatccggcgcatgcgtttgcggccgcagcgcacgatgtcgtcgcgcggccgcaagcgcagcggtcgtgcagcaacgcatcggctgtacagcaacgcatcggacggccagcccattcgcgggctgggagtactctggcagtcatgagtatcccgaaaagcgtcaccaaggcgcatgcgaccggcaatgatttcatcgcgtatctggattccgacggccgtttcgagccgaccgccgatgaggtgcggcaattgtgcgacaggcatttcggcatcggcgccgacggcctgctcaggctcacgaaaccgcagtacgtcgccgatctgagcgaggcgcaggtcgcggcgtgcgatgacggagacgccgagtggttcatggactatcgcaacgccgacggatcgctcgcagagatgtgcggcaacggcacgagggcgatcgcgctgttcgcccagcggtgcggcgtggcgtcgacgcaggtggaggagccgttccgcctgggaacgcgcgccggcgtcaagacgctgcgcccgctcggcgacgtggcgccatacggcagggatgtgttccgcgtggacatgggctcatggcggcgcggcggccttgacgccttcacggtgaccattcccggcacgccgggagccgcccgcggcacgttcgtggacatgggcaatccgcatgtggtctgcgtgatcgaagacgcgatgtccacgctgccaagggtcgaggatctggatcttgtgaccaagccggaggtctcaccggtgctggaatccgaccagaacgcggagttcgtgcgcgtcgacgagatcgacgctgccgcagggacgggagaggcgaccatgcgcgtcaatgagcgcggttgcggcgagacgctgtcctgcggcaccggtctgtgcgccaccgcgatcacgctgcgcgccaaaaccggcgtagatcactgggacatcaccgtgcggggaggcacggtgcgggtggacgtcaccgatgagaccgtcgcgctcaccggttcggccactctggtcgcggacgtgacgttgatctgatcgatcgaggctctcaaaactcgaagatacaaaaaaggaaccgccattttccaacaatggcggttccctatcttcgagttttgagagcctcgttttcgtatcaggcgaaaatcgccggcccatccacgacgataatcagcacgatcagcgcaatgatccagaccacgtccaccatcagatcgaaattcagccggtagtacttgcgcaggccgttggatttcgccggcatccgctgcacgctcaccgtagcgtgcgacagcgccatgaactggatcgtcgtggcgaacatcaggcccaggcaccacgggcacagggcgcggatcacgaacatcgattgggcgaacagccagtaggcgtacgccaaggccgcgagcccgcccagccatgtgcaaagcgcgaaccagcgcggcacgacgaccttggacaggcctatcaccgcaatcgtgacgaacacggattcggcggcgatgccgaagaaggcgttcgggaagctcaatccggcgaatttgatgaactccgcctgccatgattccgccacggtcgagcaggagaccacggcattcacgtcgcagccgagcttgacgccgggattgcgagcgagctgcagcgtctccgccgacagcatgagggagacgaacaatgccgccgcggaggcggccaacatgaccagatacgtccagaccgcgccatgacgccagccggtgagcccggcgtcgacgctgatgtcagcctgtttgactgcatcgctgttgtgagtcatacatcatccttacgttcgaggagaccgtgatgagggtggctgacaacgcggcgatatcacggtggttcttgatttttcgcggggttatgacgcgccttgtgcaataaccgacagcacacagcttacgatggatacatgactcgtttagcacttgccgccgcgccgccgaagtcgggctgggacatccactgccatacggtgtattcggacgggacgcagaccccggcgtccctggtcgaactgagccgccatatcggcctgcacggggcctcgatcagcgaccatgacacgaccagcggatgggcggatgccgaggccgcggcgcgcgaggagggcatgcgcctgctgcgcggcacggagatcacggcgtgcgatgggccggtgtcggtgcacatgctcgcgtatcagtacaatcccaacgaccgtcatacgtcggacctgttcgcgcgcacacgtcaggcgaggctgaagcgaaccaaggccatggtggcgcgactgggcgaggattatccgatcagctggcagtccgtgctggagcaggtgcacgagggggagcggaccacgatcggacgtccgcacatcgccgatgcgctggtcgccgcgggcgtgtaccgcacgcggtccgaggcgttcgccgacgcggtgagcgccacatcgaagtattacatccccacgccctccccgaccacgcacgaggtgctcgccgccgtggccgcagccggcggcgtggtgatcatcgcgcatccgggcgcggtgaaccgcaacgtgacactgctgtccgacagccagatcgagacgctgatcgaagagggacttgacgggctggaggtatggcatcgggacaatccgccgcagcagcgggaacggctgtatgccatcgcgcaggcgcatcagctgctggtcaccggcggatcggactggcatggcgccggcaagccgaaccatctgggcgagaacctgactgatgacgagaccgtggccgagatcgtgcggcgaggggcgattccgctggtctgacacctggtctgacaccgaccatcgaccccggctgtagagaaaacacaaagccgggagcggccgcagggcgttcaaaccctccggtcgctcccggtcgtcactgtatatccggccgactcccgcctacgcacaaaggcgggagaggggagccagctgagcccggcgttcggtcagagcgccccgaagcccacggcgtgcttggtctcggagccgatgagcgcgtatccgagcgcgttcgccggcacgatgatgcgacggcccttgtcgtccgtcagcttgatcggggttccggccgacagcgccgattcgatggcctcggtgacgctggccgcgtcctcctcggtgctgaaggtgacgggtcgcgccacattggcgatgcccaattcgatgtccatgtttgctcctctcgggatgatgcgctgttgaagtcgctgggtggatgatgtgtccgacgcccgtttgcgccacgggctttcagtcgcatgcacgcgtgccgatgaaagccattgtgcattgctcccatcgacgtgcgtgacggttttcgctgtaggctacttgccttgcgatgactgcagctcggactgggcgtcgcgcatggcgcgttcctcacgttcgagcagcgggatgacgatggtcggggtgtcgcgcgccgccgacgcgccgtcctgtcggtccggcgttgccggcgtcgcttgggacggggcgtcttcgatatgggcggccggcgtcgcgttcggcgtgcggtcgtcggtatcgtccgtggcgcgtgttgcgtctgcatcgcccgtgtcgtcgctgtccccgcggctcagcgtcatcgtttccgatgtcgtgcccgccgttgccgtgacatgttccgtctcagcgctgtaccgaattcccatggtctgcggatcgaactcaccggccgccttgatgtccgcggaaccggtgcggtcggtctcgtcggtgttgtcgttcgggtcggcgatgtcgtcgggcacacgcgctccggcctgtgtcgcggccgcggccttgcgccggtcgtcgtcattgagcagcgtgccgacggtgatggtcgatggcggcttggacgactgggcacccgacgtcgtcgcgggcgcggtcttacgcgtgaatgcgccgagctggtgggccagccgctccacctgcgccttgaactggatgattttctgactatcggcccggttcaacgcatcgatgaactcgccgacctgctccatttgcagccacaggttcgcgcgcagcatgatcagatcgtccagacgagaacccatcatgcggccatacgccgcaagcaccgcattgcggtgatcttcgtcaatcttgccgaaaatccacgcgagatcgcgtgccggatcgttgacctgcatgttctgccagttcgtcaccgcggtgacggtcgcgccggaaaacagcacgtcgccatccgagaacccgccatgcaccgggcaggtgacgaacgaccacaggccctccgtctcgatgatccggccccagctcgacgtgatttccggcggcacatggcccgcctgccgcagccgcttgatccaggcggtcagctgggcgcgaatctgcccggtggagaataccggatacgattcggcctgcaggaaattcggtcgcagccggtgaatggcgccgatggccgtgcccatcgccgcgcaatcatccaaagtaagcagatcgaggggtcttgcgacgccatcgttgtgcgccgccaccatcacggtcgcgccgccggtgagcgtgcttttctccttgccgtcaacgaatgcaagcaccgtatccagggcgaatccgagaccgcctggatccttggcgcgctccagcgtcctggcggcctgcacgcgcccggtcaggcgcttgcggccgtcttcggtgtcgcatgcgtatatgtcatacatcctgcctgcggcatcctgcatcacggcctgatcgatgcccgcggcgtcgtcggtgtcgttggcccgttcgctgtctcgcacgccggccatgacgatgctgggcatcgccgccgaggcgagtgccgccaacataagcttgcttcgttgagtcacactcccacactaatacaatgtcgcgcctcgcgggaggcaattggccgtatgactcgcggaaaatcacggtttgcccactatgctggcagcgcatcggccgggcatgcgccacaatggaggatatgagtgcatcgagcgagacgattcttgaggggctggatgatgcgcagatgtcggccgttaccgcgttggacggcccggtgcgcatcatcgcgggggccggagcgggcaagacccgcacggtgacccgtcgcatcgcctatgcgtgcgcgcggggggattgggatgcccgcaaggtgctcgccgtgacgttctcggtgaaggcggccgcggagatgcgcgcgcggctgcagacgctgggggtcggcgacgacgtgaccgctgcgacgttccattctgcggcattgcagcagctgaggcgtgtgtgggacgacatcttcgagacgccgctgccgcacgtgacctccgaccagcgcgagaacgtggagagggcgatcagacgggtcaccaatgccgcggacatcgatgcgcagcaggtgcgtgacgtcagggcggagatcaactggacgaaggtgtcgctggtggcgcccgacgactatccgcgcgtgtgctcggcgacgcgccgtcagccgccggcggagctcgatccgcagcgtttcgccgacgtcatcacggcgtacgagggggagaagacggtccgcggacagatcgatttcgatgacattctgctgctcgtgtgccatgtcatggatgattacgaggagttggccgcctcgatccgctcgtcgattggctggctgacggtcgacgagtatcaggacgtgtcgccgttgcagcatcggctgatgacgctgtggctcggaaacaaccgcaacgtgtgcgtggtcggcgatccggcgcagacgatctactcgttcgccggggcgagcagctatgacctgctgcatttcgcggacgagttccgcccgctggccgccgacgtcactctgaacacggattaccgctcgacgccgcaggtggtgcggtatgcgaaccgggtgctggccgccgctccagaacgggaacagtatctggtgctgcgttcggcgcgttcgggcgggccgcgcgtgggccacacatgctatgacaccgatgaggaggaggcgcggggcatcgccgcgcggatagcgcgtctggtcgccggcggtgtggatcccggcgattgcgcggtgctgacgcgcatcaacgcacagcagcccgcgatctgcaccgcgcttcgggccgagggattgcgataccgggtgaggcgtgactccggatggcagaactcggcgctcgcggatgatgctcagagccgtctggccctgctggaggccaagggattgagcgccgcagcctcatcggtgaccgtttcgacgattcacgcgtccaagggtctggagttcccgtacgtgttcatcgtcggttgctcggaggggctgattccctacggcgcatcgattgcgggcgaggctttggaggaggagcggaggctgctgtatgtcggtgtcacccgcgccgaggacggattgcacatgtcgtacgcgcgggccaaggacgagggctcccgtcccaatcgcctccccagccgcttcctcagctgacccaaggcgcatgtcgcatgccccccgctggcgggggcatgcttgtgtgtggtgacgttacttggcggaatcgttttcgtcgctttcgccgccgtcctcgccgagcagtttgctcagttcggcgtcccagtcgatggcgccgccatcgttctgcgcctcggctccgttcgcgtcgtcctttgtgccgtccttcgcgtcacctgcgacggaagctccgtcatccgttccggccctcgtaacgcctgaggccgtgtcccccgcggctccggagtcgacggtcttggcctcatcgggcaatgctggcagcagatcggggtgggaccaggcgccgtcgcgcccttcgacaccacgctccgcggtgatctgctcccagagggctgccgcctcgcgcatgcgcttggggcgcagctgcatgcccagcagcgactcgaaggtgcgttccgccgggccgcccaccgcgcgcttgcgcctcatcatctcacgaagctgctcgatatgcggaatgtgcgccatgccggcgcgccacgtcacgcaatccacccagccttcgacaagcgccatcagcgtctccagcgagaccagcgcctcacgctgctcgggcgtatcggggatgcccaccttggtcaggttcaccgcgccggagatcgactccggatccatcgcgcccgcatcgcgaagctgctcctccatcgcgtcgagatcgatggtgatgccacgcgcgtatttgccgatcagcgcttcgaatcgcggcatcagccacggcactcctgcgaacagacgggcgtgcgcgacttcgcgcagcgccaggaacgccgtcacctccgcgacggggatgtcgagcgacgtcgcgtattcctcgatgttctgcatgatcagtccgcccgcggggttcttgagcagcgcgatgccctggtcgaagctgccgttgacctcgtgcgacaggtctcccgcggcgtgccccagctgcatggcgaatgacgtgttgcccagcagcttgatgagctgcccgggatccttcatgccatcggggacgggaatcggcaccggtccggcgaacatgcccgcgatctcgccgttgaacgagttgccgagacgctcggagatcaccgaggcgagcgcgtcgttcatcgactgcgcgaccggcccggcgaatttcgcccacgattccagcgtgtcctcgacccagccggctcgtgtgagcatctgcgtctctcctgaggtcgggtcgaacgtgcaggccgtgtccagccacaggttggcctcgctgagcgcccgccgcgcgatgtcggccgactgggcgctcaccgttccctgcgagccgtcggcgttcgccttctgcaatgcgatggacttggcgagtttcacgttgatcggcccggattccacggtctgcttcatgtctccgaacgtgttcagtccgccggcggtgaacgcctgcatgagcgattgcacttcctcgggcttggggagcttgccgatatcctggctcatcagttgctcgcggatctcgtcgggcagctgcgaaagctggttccatgccatttcgccctgcaccggtccgaagcaatcgatgaaccattgccgcatcgcgttctcatccatggtgtttcccgccttatgtgttaacgtcagttgattccatattatgggaggtatggcgaatatgcatgaaaacaaccatcttcacgcgcacagcgcactttcgcgcatccgcaactacctcggctcgcactcgctcaggtatttcgccggcgccatcgccgtgatactggcagtggtgacgatgatgctgccgtccgcgtatacggtagagggcccggggccgacgcaggatgtgctcggctcgtcgtcaggctccgatgtgatcagcatctccggcgctgaaacccacaaggattccggcaagctgctgctcgtcaccgtcaacgccgccggcgtgcccgggtatcccgtcaccaacgctcaggcgctggtcgcatggcttgatccgaagcagaccgtgatgccgcaggaggtcgtgttcccggtcgggcagaccagcgaggagtacgccgaggaatcctcccaggagatggactcatcccagtcgtcggcggccaatgccgcgctctcgtatcttaagggcaagggcatggacgtctccggcgtgaaggtgtcgatgcatgtcgatgacatcggcggcccgtccgcaggcatgatgtatgcgctgggcgtcatcgacaagctcaccgaagccgatgagaccggcggcaagaccatcgctggcaccggcacgatcgacgcgaagggcaaggtcggggccatcggcggcattcggctcaagatgctgggcgccctgcgtgacggcgcgacatggttcctcgctcccgagtcgaactgcaatgaggtggtagggcacgtgccgcagggcctgcgtgtcgtcaaggtgtcaacgctcgatgaggcgtatcaggctctggtggcgatcgggcaggggcacaccgacggattggccggttgcaccgcatcgtgagtcgcccatcccggcccgccggaacgcgtccggacgaggcacggaaccggcctgtccacgcggcagcgggacggccgggaatcggccatgagacggacgcgtccatcggcatgtcctgtatcaattgcgagaaaatcccaaaaaacatccggtttttcggagtgttaacgtcgctgttcccagcgttttggtaatgtgttcaccgtgaatgaaacggcatcacagaacggtgaagaatttggtttccagtccggcgacatcgtgcaggaatggttgtgggatgacgacgtcgatgactcggtgcgcgccaagattgaggatctgaccggcgaggatctggtcgacgaggactatgattccgcagtcgacggagccattgtctggtggcgggacggtgatgacgaggacgagctgtccgacaccatcgtggacgcctattcggtcgtcggcgatgatggccctttctgggtgctgacccccaagcccggcaggaccggcgcggcgagttccagcacggtccagtccgccgctaagactgccggcatgaacgcggccacaccgctcaccgtaagccccgactggaacggcatccggcttcgggcgttcggcaagggacgctgatccggcctgtccgccggcacgataccagcgtacggcatcagaggcatcatgcatgccgccgccgtcacagccaacatgcccggggcgcgaaccgccgcacatggaatgagccgtgcacgccgtgaagcgggccccgcgaatcagcgctgcgccacggattgcttgtcaatcagcgtgcaatgaatcttcgccggtattgaggcgtccaacggcggcaggggagcggtcgtctccggttcgtcatcgtctggctcccgaccctcgatcagcgataccaatttgcgcgtcgcccaataccccatctcataatgcggcagctccacggtcgtcagctgcggctccagcgtctcggcgaacacccggtggttgtccacaccgaccacggacacgtcccggccgacgaccaggccacgtctcgccgcgttctcgtacacgtaccatgcgcgggcgtcattgaagcagaagtacccgtcgggccgcctccgctcgaacaggtcggtcacggtctgcaacgcaggcccgttgttcggcacggcgaccaccagcgactcgtcgaacggcatgcccgcctccaacagtgcacggcgatacccctccagccgtccctgctgcgcgagcatcggctccgagcagccgatataggcgatgctcgcgcagcaggcgtcgatcagccgcttggtcgcgtcgtagccgatgagcgtttcatccggttcgatgctggcataccggccggtgcgatccgtggcgtcgacgagcaccagcggataatcgtgcagcggtttcggcacgtcggtgaaacggttcgacatcttcgcgtaaaggaacccgtccaccccatagcgtttcagcgtggcgatctccctcgcctcgtcgctgttgccgtcggtgttcacggtcagcagcatataccccaacttgctggccgcgtcctgcgcgccgaggatgattccgcccgcatagggcgtggcggcgatcccctcgctgatgaaacccaggatgcgcgtcttgctggtgcgcagcgagcgtgcaagcggattaggccggtagccgagccgcttggcggtggcgcgcacctgttcggcgatggcgggtttgacccggccctcgtcgcgatcgttcaataccaaggaaacggtagagaccgacacccccgttctctcggcgacctccttcatcgtcgtcatagggagaacgatacacgcaatccgcgggtttcgcaggattgttcacgctattgacatccgcctgccggtgccatgcaatcgctcggtggcggtcatctggcggcggtcgcgggcacaggcagggcggcggttattcgtcgccggtcactcgcttttgccggagaggatggcgtcgacgatcttcggcttctcggtgagctgaccggtgaatccagggcggatgtccatgtgtagcacgaggctcgtgcggtagccctgctcggcgagcttcttggcggcctcgccggccactttgagcacctcgtccaggtcgccttccacgttggtgaacagcgcattggtctcctgcggcaggccggattcgcgaatcacctcgacggcctgcgccacatatggcgacacctcggagccgacgccgttcgcggagacctgtatagccgccacggtgttgagatacggcttgccggtttccgggtcgatcggcacttcctgcgtgacggcgttgcggtcgatggtcatatgaatgccccctgattggttggttgttgctgtgttggatggtctgtatatacggtatgttccggccggcgtcgccataagggatccgcctgccgcgtgcaggtcagcgccagtgccatgcgtggtccatcggcccggaaccgtggccgaggttcagctgcgcgccgagcgctccggtcagatagtccttggcatgacggatcgcgtcgggcagtgcctcgcctttggccagattcgaggcgatcgccgacgacagcgtgcatcctgtgccatgcgtgttcggattgtccacgcgcacgccgtgaatccatgtcgcgacgccatcggcatacagcaggtcgctcgcatcggccacgccatgcccgcccttgacgagcaccgcgcagccgtaatgctccgacacggtgcggccggcgtcctccatcgccgtatcgctcacgatacgcgtgctctcacggtcggtgtcctcagcccatttcgcagggtccagcgaggctccccggtgggcgatcaggtcaagcagcacctcggtttcggggatgttcggcgtgatcacctcggccagggggaacaggcgctcggtgagtgcagtgatggcgtcgtcatcaatgagcttggcgccggacgtggcgaccatcaccggatcgagcacgatatgacgtgcgtgatgggcctccagccggtccgctatcgtgcagatgagttccgccgacgataccatgccgatcttgaccgcggccggcggaatgtccgtgtacaccgcgtcgatctgtgcggcgaccatgtccggtgtgatattctgcacacccgtcacgcccatcgtgttctgtgcggtgatcgcggtgatcgcgctcatgccgaacaccccgttggcgagcatggtcttcagatcggcctgaatgcctgcgccgccggacgaatcactgccggcgatggtcagcaccggaggcagcgtggattgcgccgccgttgtgtcaagttgctctgtcatgccgttcattgtagccggatggtcttgaaattgcgctgtttctatggtgagatggagtcgttttgcaatcgctgaccatggatcggcgaccacggataaaggagagctgcggcgagatggcgaatgacgatatccttcggcgtgatggtgttctggcgcgtatcaccggcttcgatgaaggacgcaccgcatattatgcggtgatgccgaacggccacagcacgcagctgacgttccccagccaggagatcttcgacatcggcgacgtgctgctggtcggcaaggacttctatacgaaggtgccgccctcggtgtggccggtcaagccgcgtgtcggcgtaatccgccgtgcgctggaggactgcgtggtcatcgagacctcggatggtctggaattgctggaaggtgaatatccggtcgacatcgcgcccggaaacacggtggagttcaccgatctgttcggcatcgaacgggtgctgtggccgaccgcgatccggccgggggagtccgaccatgatgacgacatcaagcagtaccgcctcacgccgagtgccgatccgtcgctcacgttcgcggcgttcggtgggtatgagcgggtgatcgcccgcgcgaaggagctgatcgagacgcagctgggcaacagcgcccagatgcgggcgatcggcgcgaagcccatcaagggcgtgatcttcaccggcgcgccgggtaccggcaagacgcacctggcccgcatcatcgcgaacgtggctgacgcccagttctaccttgtctccggcccgacgatcgtcagcaagtacgtcggcgacagtgaggagacgctgcgcatgatcttcgccgcggcgcagtccgacaagcgcgcgatcatcttcttcgacgagatcgattcgatcgcctcctcgcgcgagaccgacacgaacggcgtcggcaagcgcctggtggcgcagctgctcacgttgatggacggtttcgagtccaagggcaatgtggtggtggtcgccgcgacgaaccgcatagaggacgtggatccggccctgctgcgcccggggcgtttcgattggcagattccgttcccgatgccgagcgagcatgaccgtctgcgtatcctgcaggtgcaggccgcctcgctgtcatgcgagggcgagctgccgttgaccgacgtcgccgagcgcaccgagggctggagcggagccgaagtgtgcgccatctggaccgaagccgcactggtggccgccaaggacaagcgtgccgcgatccgcgccggcgacctcatgaccgcattcgagcgcgtcgagcatcggcccgagttccgcgcacgccggcactaggtgcgagctcgattctcggctcctgcttgcggtaagggttggttcttgccctcgctggcggccgcaggccgtccttgattgcagggcccggagggctcccgcgtagcgggcgatggtgtggtcttgtgtttcgtcggttttgcatccgttctgccgtttgtccaccctccggtgctgcgtgccacctcccgccagcgggaggggatgggtcttgtctgctggtctgattgggatgtggagtcttttgttccaaagtgtgagacaagtcgaggattttgtgccacaccacgtcgaaaacgccggttttgcgcgtggtgtggcacaggaccttgctgcggaatcggttttaaccggttacatgcgctgccgtggtacaagaggaatatcggcaatccttgaaaaatggccgattccgctgtccggtgcgaatcctcccgtatcgggcgtgtaccacaccacggtcaaaaacgtgtttttcgtcctggtgtggcagcgacttcgccgtcatggctgcacccgcacagcctcatccgcacagccgcacccgcataaccgtcaccgaccggcgggagagcgacgacctgatgcgctaccgatgcgcccgcaggaagtgcttgatgagtcgcaccaaggcgaatcccacgaatgagaatacggtgaataccagcatgaagtatccgatttgctccatgcagccccatgaaagctgccatccgccaatcgaggtgcagacgtcggccttcgcgcaaggaccgccttcgaacccgtggatcagagcgaacagcagcgggagtgagaccgctacgcatccgagagggaatttccaagtgcttttcctgaagcaggcagccgcgatattgatgataagcaatactggaggaacaaggaagttgatcatcagtgcagcggccatgaagccctcataatcgggctgaactatacaggccagaagcaggccgtaaaggacggctacgatcagcatgcaggcgaatcgtccgggattgccgcgtatccacgaaccggatttcgacagtatggaaaggctgttgttcgtcgtactcatggaatccctttctcgacattgagcaacgtatatccatgatacgggatggcgcccgtcagaggaagagccgcaaatacgaatgccccccgctagcggggggcattaccgatgaaggctggagcttactcgctggccttggagtagagcttgccgccctgggcgcggtacttttcacccatggcgtccataccggcaaggatctcctcggggctcaggacgttggcggacacgacggtgtcgtcggtgaccgggttcgccggggtctcgacgccctccgggatcttgccggtgacggcgtccgcgacgatctgctgctgggcggcctcgccgccgaacgccttgcggatgttctgcgagatggccatcgagcagaacttcgggccgcacatcgagcagaagtgcgccatcttggccggctcggcgggcagcgtgtcgtcgtggaaggcgatggcggtatccggatcgtagctcaggttgaactggtcgagccagcggaactcgaagcgggccttcgagatcgcgttgtcgcggtccatcgcgtgcgggtggtgcttggcgatgtcggcggcatggcaggcgatcttgtaggcgatcacgccctgcttgacgtcatccttgttcggcaggcccaggtgctccttgggcgtcacgtagcacagcatggcggtgccgtaacggccgatttcggtggcgccgatggcggaggtgatgtggtcgtagcccggcgcggtgtcggtcgtcagcggtcccagcgtgtagaacggggcgccgtggcacacggccttctccagctcgatgttcatgcgcaccgtgtcgaagggcacgtggcccggtccctcgatcatgacctgaacgtccttggcccaggcgcgctcggtgagctcgcccagggtcatcagctcgctcagctgggccgcgtcgttcgcgtcggccagcgagccggggcgcagaccatcgccgagcgagaatgccacatcgtacttggcgaagatgtcgcacagttcgtcgaagtgcgtgtacaggaagctctcctgatggtggcgcaggcaccagtcggccatgatggaaccaccacgggagacgatgccggtgacgcggttggcggtcagcggcacgtagcgcagcagcacgccggcgtggatggtcatgtagtccacgccctgctcgcactgctcgatcacggtgtcgcggaacagctcccaagacagcttggaggcgtcatcctcgaccttttcgagcgcctggtacatcggcacggtgccgatcggcacgggggagttgcgcaggatccactcgcgggtggtgtggatgtcgttgccggtcgacagatccatcacggtgtcggcgccccacttggtggcccaggtgagcttctccacttcttcatcgatggaggaggtgacggccgaattgcccatgttggcgttgagcttggtgaggaaggcggatccgatgatcatcggctcggcttcggggtggttgatgttgcagggcatcacggcgcggccggcggccagctcggagcgcacgagctccacgtcgcagttctcgcgggtggcgacgtactgcatctccggggtgatgatgccgtgacgggcgtaccacatctgggtcaccgggtggtccttggcgcgcatcggctggtgcgtgcgtccacgccattccttggtggcgcggccgcgcttgatggcgcgcttgccgtcgtcctgcaggttgcggcggcggccctcgtagtcctcgatgtcgccgcggtcgcggatccagtcgaggcgcaggggcttcaggccctccttcgggtcgcacttggggccttcggtgttgtagtcgtggaacggggcgttcgggcccaccccgggggtgtcggagagcttgatctcagtgtagggtacctcaaggtcgtaggagccgtactcgtaggagaacggcacagacttggtcttgcggatgtgcgccttgtcgcgctgcttggacccacgggcggcgatgtcgacgcgctgctgcttggcgagcttctgcgcgtccttggcgtccttggcgttggtgaacttcttttcggtggcctcggccccggcggcggcgctgccttcctgcgcggcctgcgtgtcggtggcgggggtgtgggtcacgatgcgcggggcgtatccgtggcgctcatctgcgcgcacggccttccagccggagaccatctcgcgggtggcggcctcggggtcttcggcgcccgcgatggcggagaccgcgaaccagccggcggccttcgtgccggccagcatggccatgtcagccgcggtcacgccgccgccgacgacgaccgggaactcgctggcggagcagatcgtgttgatctgcgcggcatccagggtcttgccggagccgtcgttgccgcccaccgaggcttccggcttggtggaggagacgtgcagaggtccggcgccgatgtagtcgatgcagccgtcgggcagctcattgatgagtcggaccagggactcggtctcagccgacagtcccacgatcgcttcgtcgcccagcagggcgcgggcctcgcgcggctccatatcgctctggccgatgtgcacgccgtcgaccttgatgcccttgcggcgggcctgccacaccacgtcggcgcggtcgtcgatcacgaaggccacggagtcggacttctcgttgtcctcgatgatctgcgcgatgtcgcgggccatctcggtcagctcagaggcgtcggcgcccttggctcgcaattgaatgaaggtggcgccgccatgcaaggcctgatcgatcacctcggtcagcggccggtccttgcagtcctgggggccgaccacgaagtacgcgctcaggtcgaacgaatcgcgcatggacgcgaatgggtattcattgctcatctgttgttcctttaattgtgttattggaagaatatgatgcctattggaagaatatgatgccggcgccactcatcgggagcaccgggaggggcggctatcgcatgtcgatcgcgcggtctgccacctcctcggcggtaacgttccacagcgcgtccagcagcgccacctggaacgaaccggggccgttgcttcgtttctcggctatctcgccggccgtgttgtacagcgatgtggcggcgagcgcggcgatcagcggctgcgcgacggcgagatacacggcggtgacgccgccgagcgagcatccggcgccgatgattttcgtcatcatggcgctgccacccgccagccggtacacgtgttcgccgtcggtcaccatgtccgtcgcaccggagacggccaccgccgccgtgccgttggcgccgtgcctcgccatgaaccgtgcgagccgctgcgccggtgcgatggcggattccacgtcgtcgacggattccacgccggcgggcttggatgcggtagcggtcgcggattcctcgttcagcccccacatggcgtcgagcgcgatgatctccgaggcgttgcctcggatcacggtcggcggatagcgcttgaatgactgcaatatggcggttctggtctctccaatgccggcggcgacggggtcaagcacccagggatggccggtgttgtggaacgccctcgccacttgcggcagcgcgtccttgtagaacggcagcagggtgccgacgttgatgtagtcggcgccgctgatcgtggcggtgtcgatgatgtcgtccggcaggaagctcatggccgccgcgccgccggcggcgagctgcgcgttggcgacaaggttgatggtgacgaaattggtgaaggactgtgccagcggcgtagtctcgcgtaccgtgcgcaccgcgtccgctatctgctcgtgcagtgatggctgtgtttgcggcgatatccgcgtgttcggcgattcctcgctcataatcattgctccctacgatggtcttgaccaacaggttcaaagggtcaggcgtgtggcctttctcaactcgcgtactgctgcgggttcccctgcattgtgcccttcaacgctatggcccaatatggacattgtgtcttgcgtttcttgaaggtacgtggtaatggcgccctttcgttgccggcatgcgttgcgttgcggtttttccggccctgtatgggggatacaggattggcgatggcgacacgccgtttttgttaatggcatttacatgaaatacaggtaatgagatatcattctcatgatcaccgtgtggatatcgcattggtgcgtatacactaacagcaacagagcggcgcggcaggcgctcgtggattcaatgaagaaggaacgtttatggcagttcgcagacttggtggccgcatcgtggctttcgccgccacagtggccttgtcaataccgttagggttgttaacaaattcagcgtgggcggtcgaggacgccacccgatccgactccaccacgcagatgagctccacgccggaggtggtctactccagcgccgtggattccaagcagaatcgcacctcggatttcgacgccaactggaagttcatgctgtccgattccgtgcaggcgcaggatccggcgttcgacgattcggcctggcagcaggtcgacctgccgcatgactacagcatcacgcagaagtactcgcagagtaatgaggccgaaagcgcataccttcccggcggcaccggctggtaccgcaagtccttcaccatcgaccgggacctcgccggcaagcgcatcgccatcaacttcgacggcgtgtacatgaacgccaccgtctggttcaacggcgtcaagctcggcacccatccgtacggctactcgccgttctccttcgacctgaccggcaacgccaagttcggtggggagaacaccatcgtcgtcaaggtcgagaacaggctgccgtccagccgctggtactccggctccggcatctaccgcgacgtcaccctcaccgtcaccgacggcgtgcacgtcggcaataacggcgtggccatcaagaccccgagcctcgccacccaaaacggcggcaatgtgacgatgaacctcaccaccaaggtcgccaacgacaccaaggccgcggcgaacatcaccctcaagcagaccgtgttccccaagggaggcaagaccgacgccgccatcggcaccgtcaccaccgcatccaagtccatcgcggccggtgccagcgcggacgtgacctccacgatcaccgctgcctcgcccaagctgtggagcatcaagaacccgaacctgtacaccgtgcgcaccgaagtgctcaacggcgacacggtgctcgacacttacgacaccgaatacggcttccgctggaccggcttcgatgcgaccagcggtttctcgctcaacggcgagaaagtcaagctcaagggcgtctcaatgcatcatgaccagggatcgctcggtgcggtcgccaaccgccgcgccatcgagcgccaggtcgagattctccagaagatgggcgtcaactcgatccgcaccacgcacaaccccgcagccaaggcgctgattgacgtctgcaacgagaagggcgtcctcgtggtcgaagaggtcttcgacatgtggaaccggtcgaagaacggcaacaccgaggattacggcaagtggttcggccagaccatcgccggtgacaacgccgtcctgggtggcgacaaggacgagacctgggccaagttcgatctgaccagcaccatcaaccgcgacaggaacgccccgtccgtcatcatgtggtcgctcggcaacgagatgatggaaggcatcagcggcagcgtctcggacttcccggctacctccgccaagctggtcgcatggacgaaggccgcggacagcacccgcccgatgacccacggcgacaacaagataaaggccaactggagagagtcgaacacgatgggcgacaacttgaccgccaacggcggcgtggtcggcaccaactactccaacggcgcgaactacgacaagatccgcacggaccacccctcatgggccatctacggttccgagacggcgtccgccatcaacagccgaggcatctacaaccgcaccaccggcggcgcccagtcaagcgacaagcagctgaccagctatgacaattccgcagtcggctggggcgccgtcgccagctccgcctggtacgacgtggtccagcgcgatttcgtcgccggcacatacgtgtggaccggcttcgactacctcggcgaacccaccccgtggaacggcaccggctccggcgccgtgggctcctggccgtcgccgaagaactcgtacttcggcatcgtcgacaccgcaggcttcccgaaggacacctattacttctatcagagccagtggaacgacgacgtgcacacgctgcacatcctccccgcatggaacgagaacgtcgtcgccaaggactccggcaacaacgtgccggtcgtcgtctacaccgacgcggccaaagtcaagctgtacttcacaccgaagggcagcaccgaaaagcgactgatcggagagaagtccttcaccaagaagaccaccgcggccggatacacctatcaggtctacgagggcgccgacaagaactccaccgcccacaagaacatgtacctgacctggaacgtgccgtgggccgagggcaccatctccgccgaagcatacgacgagaacaacaggctgatccccgaggggtccaccgagggcaacgcgtcggtgaccaccaccggcaaggccgcgaagcttaaagccgatgccgaccgcaagacgatcaccgcggacggcaaggacctgtcgtacatcgaggtcgacgtgaccgacgccaacggccatatcgtccccgatgccgccaaccgcgtcaccttcgacgtcaagggcgccggcaaactggtcggcgtcgacaacggcagctcgccggatcacgactcctatcaggccgacaaccgcaaggcgttcagcggcaaggtgctcgccatcgtccagtccaccaaggaggcgggcgagatcaccgtcaccgccaaggccgacggtctgcaatcatccacagtgaagatcgccaccaccgccgtccccggcaccagcaccgagaagacggtccgcagcttctactactcgcgcaactactacgtcaagaccggcaacaagccgattctgccgagtgatgtcgaggtgcgctactccgacggcacgtcggaccgtcagaacgtcacatgggacgcagtcagcgacgaccagatcgccaaggccggttcgttcagcgtggccggcacggtcgccgggcagaagatctccgtgcgcgtgacgatgatcgacgagatcggtgcgctgctcaactattcggccagcacaccggtcggcacgcccgccgtgctgcctgactcgcgtccggccgtgctgcccgacggcaccgtgaccagcgcgaacttcgccgtccactggaccaagcccgccgacaccgtgtacaacacggccggcaccgtcaaggtccccggcaccgccaccgtcttcggcaaggagttcaaggtcaccgcgacgatccgcgtgcagcggtcgcaggtcaccatcggcagcagcgtctccggcaatgcgctgcgcctgactcagaacatccccgccgacaagcagtccgacacgctggacgccatcaaggacggctccacgaccgtcgacgccaataccggcggcggcgcgaacccgtcagcatggaccaactgggcgtactcgaaggccggccacaacaccgccgagatcaccttcgagtacgcgaccgagcagcagctcggccagattgtcatgtacttcttccgcgacagcaacgcggtgaggttccccgacgccggcaagacgaagatccagatctccgcggacggcaagaactggacggatctcgctgccacggagaccatcgcggcccaggagtcgtccgaccgagtcaagccgtacacctatgacttcgctccggtgggagccacgttcgtcaaggtcacggtcaccaacgccgacaccacaacccccagcggcgtggtctgcgccggcctgaccgagatcgagctgaagaccgcgaccagcaagttcgtcacgaacacgtccgccgcgctctcgtcgctgacggtgaacggcacgaaggtctccgactccgtgctcgccgccggctcctacaacacgcccgcgatcatcgcggacgtcaaagccgagggcgaaggcaacgccagcgtcaccgtgctgcccgcgcacgacaacgtgatccgcgtgatcaccgagtccgaggaccacgtcacgcgcaagaccttcaccatcaacctgggcacggagcaggaattccccgcagactccgatgaacgcgactacccggccgccgacatgacggtcaccgcgggcagcgagcagacgtccggcaccgcgaccgaaggcccgaagaaattcgcggtcgacggcaacaccagcacgtactggcattccaactggacgcccaccaccgtgaacgacctgtggatcgccttcgagctccagaaacccaccaagctcgacgcgctgcgctacctgccgcgccccgcgggcagcaagaacggctccgtcaccgaatacaaggttcaggtcagcgatgacggcaccaactggaccgacgcgggctccggcacatggaccaccgattacggctggaagctcgccgagttcaatcagccggtgaccaccaagcacgtgcggctcaaggccgtccacacctatgcggattccggcaacgacaagttcatgtccgcctccgaaatccgcctgcgcaaggccgtcgacaccaccgacatcagcggcgcgaccgtgaccgtgcccgccaagctgaccgtcgaccgggtggacgccgaccatcccgccaccttcgccacgaaggacgtgacggtgacgttgggcgacgccacgctgcgctacggcgtggactacctgctcgactacgcgggcaacaccgccgtcggcaaggccacggtgaccgtgcgcggcatcgacaagtactccggcaccgtcgccaagacgttcaccatcgaactgaagaacgccccggcgccggaaccgacgctgacctcggtgagcgtcaagaccaagccttccaagctgacctacgtggtcggcgacgcgttcgacccggcaggactggtgctgcagctcaactatgacgacgacagcaccggcaccgtgacctggaacacgcagacggccggcgacttcacgttcaagcctgcgctcgacgcgaagctcaaggtcaccgacaagaccgtcaccgtcacctaccagggcaagtccgcggtcatcgacatcaccgtctcgcagcccgccccgaccgtcagcaagacggatctggacaaggccatcaaggcgatcgaggccaagaacccggattcatccaagtacacggccgactcgtggaagaccttcgcggacgccatggcgcatgccaaggccatcatcgcggatgattccgccacccagcaggacgtcgataacgcgctcaaggcgctgaccgacgcctacgccgggctgaccgagaagacgcccgaacccgcccccgtcagcaagtccgagctggacaagaagatcaaggcgatcgaggccgagaagctggacgggtcgaagtacacggccgactcgtggaaggcgttcgagaccgccctggcgcatgccaaggccgtcaccgccagcgattccgccacccagcaggatgtggacgcggcccttggcgccctgacctccgctcgcgacggactgaccgagaagggcgaggtcaagcccgacccgaagcccgaaccgggcaccgtcgacaaggcggcgctggataaggcggtcaagaaggtcgaggccgagaagctggacgggtcgaagtacacggccgagtcgtggaaggcgttcgagaccgccctggcgcatgccaaggccgtcatcggcaacgccaactccacgcagttcgacatcgacaacgcgctgtcgatgctcaacgacgcccgcgccgcgctcaaggagaagcccggccgcatcatcgccatcatcgatggcagcgcactgagcaagaccggcgcatccgtcgccatcatcgcctccgtcgcggccgcgatgctggcggtcggtgccggcgtcatggcgttgcgccgcaagcgcttctgacccacacgagactctcgcgagtctccccgggtgccccgtcgacgatcatgccggcggggcacccgcatatccgcaggttggatgctgccgaacaaggcggcgggctgtcaccgtctgccgttagactcgtgcgagcatactaagtccccaaaccgttcaaaccagaaggtgcattgtggctgtttctaaactcgatgaagtcgtatccctcgccaagcggcgcggattcgtgttccccgccggcgaaatctatggcggcacccgttccgcatgggattacggccccctcggcgtcgccctgaaagacaatatcaagcgcgaatggtggcgctccatggtcgtcacccgcggcgacgtggtgggcgtggacacatccatcatcctgccgccggccgtatgggtcgcttcgggtcacgtctcagtgttcaacgatccgctgatcgaatgcctcaagtgccataagcgccagcgttccgacaagctggaggagtcctacgccgaaaagcacggcgacaagctgcccgagaacggtctcaaggacatcgtctgccccgagtgcggcacccgcggcgagtggaccgaaccgcgtgacttcaacatgatgctgcgcacccacctcgggccggtcgaggacgagaacagcctgcactacctgcgccccgagaccgcgcagggcatcttcgtcgacttcaagaacgtgatgacctcctcgcgttccaagccgccgttcggcatcgccaacatgggcaagtccttccgcaacgagatcacgcccggcaacttcatcttccgcacccgtgagttcgagcagatggagatggagttcttcgtggtgcccggcaccgacgaggaatggcaccagtactggatcgacacccgcacccgctggtacaccgacctgggcatcaaccccgagaatctgcgtcactacgagcacccgaaggagaagctctcccactactcgaagtgcacggtcgacatcgaatacaagttcggtttccagggctccgactggggtgagctcgaaggcatcgccaaccgcaccgactacgacctgagcgcgcattccaagcactccggcgaggatctgagctacttcaaccaggccaccggcgagaagttcgtgccgtacgtcatcgagccggccgccggcctgacccgttccctgatggcgttcctcgttgacgcctacgacgtcgacgaggcgccgaacaccaagggcggcgtcgacaagcgcaccgtgctgcgtctcgacccgcgacttgctccggtcaaggccgccgtgctgccgctgagcaagaagcccgagctgcagtccatcgcccacgatctggccgccgacctgcgtcagcacgagtggatgatcgactacgacgaggccggtgccatcggccgccgttaccgtcgtgaggacgagatcggaacgccgctgtgcatcaccgtcgatttcgacacgatcgacgaccaggccgtcaccatccgcgaacgtgacacgatgcagcaggagcgcgtcgcgctcgacaaggtcgccgactacgtggccgcccgcgtgtccgagaagcgcgtgcgctaccccgagggccccgtcagcatcaccggcaccaaggccgccgacggcggcaccgacgtcgccaaggagaccggcgtggacgagtccgccccggtcaaggtcgccgaggccggtggcctgtactgatcgatacccggcccgactacaccgggccgggtgctgaacatcattcggacagcccccttttcaccaagggggctcttgtacattcaagacatgtatggcatgagccgtgccgattcgtgggggagagccgtgacagacaccgttgaacagaccatcgccgtcgacgcgcatgagaccgacgtgctcgacccgcgcaccgacgcaccggccgggaaggaaccggtcacgatggcaccagtcgatctcgggccgatccacgtgccgacgccggtggtgctctccccgatggcgggcgtcacgaactggccgttccgcgtgctgtgtgaggaatacggcccggacggcctgtacgtggccgagatgattacggcgcgcgcgttggtcgcccgcaatccgaaggcgctgcgcctgtgccggttcgcgccgagcgagcgcatccggtcgctgcagctgtatggcgtgaacccggccatcgtcgagcaggccgcgcgcatcgtcgtcgatgaggacatggccgaccatgtggacctgaacttcggctgcccggttcccaaggtcacccgtcgtggcggcgggtccgcgctgccgtggaagaccgacctgttccgcgagatcattcagcgcgtggtgaaggtgtgctcggcggcgaacatccccgttaccgccaagatccgcgtcggcatcgatcacagccatgagacgttcatggaagccggccacatcgcgcaggaggaggggtgcgcggccgtcacgctgcacgcccgcaccacggcggaatactatggcggccattcggactggagccgcataggcgaactggtcggcgcgctggacatcccggtgttcggcaacggcgacatctggggcgccgacgacgccctggagatggtccgcgagacgggatgcgccggagtcgccatcgggcgcggatgccagggccggccgtggctgttcgccgatatcaggaacgccttcgcgggcagcgacgagcgcgtcaaccctacgctgggggccgtatgcgacgtgatcatgcgccacgcccggctgctcgtcgagttctatgacggtgacgagcgcatggccgtgcacgacctgcgcaagcacatcgcctggtatctcaagggattccccgtcggagggacgacgcgcagggcgttcatggagtgcgagaacctcgccgacgtggagcgcgagacctcgcgtctcgatcccgccatcaccttccccgaacgggtgaaggacaagccgcgcggccgtgttcgctttgcaaaaaaagtgcatctgccgtacggttggctcgactcgcgggtcaccacgcacgaggagcgcgagacgctgttcggcgacgatccgatggacgccggatactgagacggcatccgggtcatgggccgaatgcggccatggtgtgtcgttttgtgcaaatgagatggaaaaacgttgatacacgccgagaaaatagctttataatcaatggttctgcgatagagttatgcgtaaccgtgagtgacaggagacaatggtgagcgagattgcccagactgacaatttcaacgacaggaccaacatcaaagtcgtcggtgtcggtggagccggcggtaatgccgtcaaccgcatgatcgccgaaggcctgcagaacgtgcagttcgtggccatcaacaccgatgccaaggatttgctgcgctccgacgccgatgtgaagatctcgttgaatgacgcttcaagccgtggattgggtgccggcgccgatcccgagcggggcagcaaggccgcgcaggatcaccagtccgacatcgaggaggcgctcaagggcgccgacatggtcttcgtgacctgtggcgagggcggcggcaccggcaccggcgcgagccccatcgtcgcccgcgcggcgcatcagcagggggcgctgaccatcgccgtggtcacccggccgttcacgttcgagggaccgcagcgttccgcctccgccgatctgggcatcgagaacctgcgcaaggaggtcgacgccctgatcgtcatccccaacgaccggctgcttgagctgtccgaccgcacgatcggcatcgtcgacgccttcaagaccgccgattcggcgctgctcgccggtgtgcagggcatcaccgacctgatcacgatgaactcgtacatccatgtcgacttctccgacgtcaccgccatccttcgcggcgccggcaccgcgctgttcggcatcggctccgcgcggggcgaggaccgcgccacgcaggccgccgagatcgccatcagctcgccgctgctggaatccagcgtcgaaggggctcacggagccctcatcaacatcgccggcccgaccgacctcaagctgcaggaggcctccgcggccaccgagctggtgcgcaaggccatccaccccgaagcccagatcatctggggtctcgcgctcgacgacgcctacggcgacgaggtccgcgtcacggtcatcgcggctggtttcgacgccgattccaagaacaccaacgtaccctcgatgaagggcgccacgaccgccgcatccatcccggcttcccacaccacggaccccgtcacgccgacgcacgcgcacgaccagcagcagccggtcgcgccgagcatccccgtgcgcacgcagccatccgcgaacacgcctatgaccaccaccaatccggcggcgcgtcaggtgccggatttcgcgctgcgcaagggcggccccgcgtcgatgccgatcgatgacgagacctccgagcacgatatcgtctcctccggtgacctgggcgacctcgatatccctgattttctgcgctgagccgaaaggaactgaacagtcatggctgggtttatgaagaacgcgatgcagtatctgggcatggcggatgttgccgaagacgatgagccgatggacatccaggatgaggatcccggattcgacgacgatcattcggtcactccggtgtcccaggctgcgccatcgtcgccgacatccgcgcccagccgtgagtcgaatccgttccagggtcgcgtgagccgcatcaccacgattcatccgaagtcctacgaggacgcgcagctggtggggcgtgctatccgcgacggcgtgcccgtcgtgctcaacctgaccggtgtctccgaggccgtggcgtaccgcatcgtggacttttccgcgggcgtcgtcttcggcgtgcgcgggtccatcgagcgtgtcactccgcgcgtgttcctgctcagcccggcccaggtgaacatcaaggtggaggagccgcaggcgccgtcctcggcgcacgacctgttcgccgactgatctgccggcggtcggccggattggcggctgtagacgattcgtcgtcatgacagcggcggcggtaatgcccagttgacgttcagctgacggcaatgaagctgtatgccgttttgataggctggaaggcatggtgttcacaatagtgcgtctggtgattgactggattatcgacgcttatatcacggtgctgttcgtccgtatgatcctggattgggtgtcggtgcttgcgccgcgttggtatcccaagggcgtcgtcgcatcgctgatcaatgtcgtctaccagctcaccgagccgccgttgcgctggctgcgacgctacatccggcccataccgatggggcctatagcgatggacgtcagcttcatcgtgctgtacaccgcacttgtcgccttgagaatattggtgtaaatcgcgccgtaatcacgcatacggcgagagttctttcagggttcgtgctagcatcggaaggtgataccaacacagcgaggcatcgtgcccaaagcgaggtgtaagttttatggctcttttgacgcctaaagatatacgggagcataccttccagaccgtgcgtttcaaggaaggctatgatgtcgacgaggttgacgattttctcgatcaggtgacggaaaccgtcgaggcgcttggcaagcaggccgttgcaagtggccaggcgacgcagtcccttcctcccgacgtcgccaagctcaactccaagatttccgagttgactgcgcaggtacagtcactgcagagcgaaaacgagcagctcaagtccgcggcgcccgtcgccagcaaggacgatcaggcggctcaggtggctgcggcgaaactcaccgaagccgaggagagcaaccgcgcgttgtcccagcagaacgagcagctcaaggatcaggtggatcgcctcagcggccagatcgaccagctgaccgcgcaggccgcccaggcctccggcaaggccgatgtcgccgcgcagctcgccgcggtgcagaacgagcgcgaccagtaccgcgtcagcgccagggacatgagcggacgtctgcaggaagcgcagcagcaggccgcctcctaccagcagcagctcaacgatgccaagaagcacctcgatgcgttgcagcagcaggccgcgcaggcctccgatctggctcgtcagctggaggagtccaagcagcgcgagaaccagctgcgcgagcaggtcgccaaggtcgagccgagcacggagaccggcagcctgcagaagatcgctggtgccgccgccgctgccagcagcgagcccgagcgcgccaccgccatgctgacgctggccatgcagctgcacgaccagtacgtcgacaagggcaaggccaaggcgaaggaaatcaccgaggccagccagaacaagtacaacgagctggtcaccaaggccaacgactactcgtcccgtacccgtaccgaggccgatgagtacaacaagcaggttcactccgatgccgacgcgtactcggagcgcactcgttccgacgccgacgcctactcggtgaagacccgtcaggatgccgacacgtaccgcgagaacacgcagcagcaggccgacaactatgaggacgaggtgcgtcgtcgcgccggcgagtacgacagcaagacccgctccaacgccgatgagtatgcgcagcaggtgcgtgacaagctcaccacccagtccaaggtcatcgagggcaacattcagggcctcaagcagttcgaagccgaataccgtgcgcgtctgaccgagttcctcggccagctgtctcgtcaggtgtccgatacgaacaactacagccagatcggcaagcaggcggaatagtcgatgaaggatatccaaggacggctgcgtgttcgcgtagccgtctttgcatgtgtggcggccgtggcgctgggcatcgatcagctcaccaagatgtgggcgcagcaggcgttgggcgacgggcgtacagtgccgctgatcccgggcctgctttcgttgacgctggttcataatccgggtgcgtcgctcggtctcggatcgggaagtacatggctgatttcgctgctcgccgtggtggcgtgcgtggtgatggcggtgctggcggcacgcacgatatcgatgcgctggacggtgatgttcgcgttcgcgttcgccggagcgttcggcaatctgatcgatcgcgtggcctatgcggacgggttcctcaatggcaaggtcgttgatttcctgaattatggttggtccgtgggcaatgtcgctgatatctatctggtgatggccggcatcggcgtcgtggtgctgattgtgctggatgtgccgttcagtcgcaaggacctcgatcggattgagcatctgggggaggatgccggtgacgtggcgcgtgacggggagtcagacggcacggcggacgaatcgcaggactcgtcagcgatggtgcaggatgcatcgtccggctcatcccggacggaggtgaccgtttcgagccgtcagcctgatgactcggagaggagcgcttcatgagccgtctcgttccggcgcccgacgcattggtggggtcacgattcgacgtggcggtttccaagatgctgggcatctcgcgtgccaaggcggcggatcttatcgaatccggccaagcccgcgtgctggatcgtgcgatcgccaagtcgggcacgctgctgtatggggagaccgtcgaattcgacatcgccgaagaacggcatgagccggaaccggtgtgtctcgacatggccatcgtgtatgaggatgacgatgtcgtcgtggtcgacaagcccgtgggcgtcgctgcacatgcttcggccggatggacaggccccaccgtattgggcagcctgctcaaacgcggcgtgcgcatcacctcatacggagctcccgggcggcagggcatcgtgtcgcggttggatgtgggcacgtccggcctgatgctggtgtgcaagtcagagctggcgtacaaggagatgcggcggcagttctccgagcatgaggtggtcaagacctatcatgcgatggtccagggcaacctcaaggaggacaaggccaccatcgaagcgcccatcggccgcgccaaggtgtcggacttccgcttctgcgtcacgccgtcgggcaagccggcggtcacacattgggacgtgctggaccgattcggcgaggcgacgctggtttcggtgaatctcgaaaccggacgcacgcatcagattcgcgtgcatttctcttcgatcgggcatcctctggtcggagacccgatgtatggggccaatccggtgctggccggggagctcggcctggaccgtcagtggttgcatgcgatgaagctggagtttcgccacccccgcacccatctctggacgtcggtcgaatcccactacccggccgatcttgcccatgcactggaacttatgcgcgccaggcatgcctcaactggtctggaagccgccgactagcgtacccaatcggtctgtcgcgtagcgctgtcatcctactgtcgcccccgctggcggggggggctgtcgcgtagcgactgggggtggtccaacgccaattcgcgcccccgctgttcttacttatcgcgtttcttccatgcaacgacggaagtgaccacgccggccgccagcagcggtacgcaggccaacgccgcgacgccttcaaccagcagcaggatggcgtctgcgggattgtagacgccgcgattgagatacatataacatgcgattgcggccagtgccgatactgtgccggccgccagcagcgcaaagccgagcgtgcgcaaggcatcatgcgatgaggagcaatactgggccgatgccgcagtcggcatggtcggcgcggactgcacggtgaccggcggcgaatcctcatagtgtggctgatttgcggacgtcattgttcctcctggtggttcgttgccgcgaattgtctggcgacggcggatcatccttgatggcaatctatgcgacggagacactttttgtccagcggaacggacaatgtggtcgaaggctgccgagttatccacattttgggcgtgtcgcgccggattcgattcagctttcgcgagttacatgtggcattttcgcagtgtttactgatggtcgtcattcgctgccatacatgtccctcctgtacaatgaccgtgtcatgcatgatgagacaaggggatgagtatgtatacctcgttggacaggttccgcatcaagccgggcaaagaggatttggcccgcgaatggttccgatatctgaacgatcacttggccgaagcgaatgcgacgatgccggctgagggtgcgcatatcgagtcatggttcctgcacgaggaatcggacggactgtacggatacgtgtacgtgatctacgacgacaatgataaggctgtcgaagtgttcaaggagagtgagaatccgttggacatcaagcacaacgagtacatgaacgcctgcatcgattaccatgactacgccgagatgaagcctgccgtggcgctgggcgactactccgtattccggagatgattggtcgacggttcgtcgacgccgttgtgtttgcagactcgtttgtacaacttgcgcatttcggtcaaatgcataagttgtacaaacgatttccctggagaccctacttgccttgctgcgtttcgttggaattccagcgttttcaggaatacccgtggctcgcggcaacgggtgtgtgcgctgtttcccgcgattatgcgggacaacgtccgcattatggcatttcgcgggcgttgtacacacggcattgcattcgggtcggaaacgcatggagcaagttcttccgcctcgccgccggggcggaagaaccatatgcactgagacatgtcgcccgaggaataatgcagaggacgctccgccagcgcacaatcagttcttgtgcagtttggcgttgagctcaatccccgtcttccggtagcgggcctcaatgcggccgttgacggagttgcggatgaagaggatgttgtctttgccgctcagatcggcgcccttgacgacgtccagcggttcgccggcggcggctttggccttgtcccagacggtgatcttggtaccggcggtgacgtacaggcctgcttcgacgacgcagttgtcgccgagcgagatgccgatgccggcgttggcgccgagcagggagtgctcgccgatggagttgcggagcttgccgccgccggacagggtgcccatgatggaggcgccgccgccgatgtcggagccgttgccgacgacgacgccttgcgagacacggccttcgaccattgagacgcccaaagttcccgcgttgaagttgacgaagccggcgtgcatgacggtggtgccttcggacaggtgggcaccgagacgcacgcggtcggcgtcgccgatgcgcacgccggagggaaccacgtagtcgatcatgcgcgggaacttgtcgattgacagcacgttgacggtggcggcgggagcggcggccggaagcccggcggaggcggcgaaggagcgcgcggcgctggtggcggccgattcgacgtcgagcttgcgggcgttgaagtcttcgaccgcgaacgggccgtaattggtccagaccacgttcgtgagcttggcgaagatgccgtcgaggttgagggtgttcggctgggcgaggcgcatggagagcaggtgcaggcgcaggtaggcgtcggccgcatccgcgatcgggtcgtcaagggagcttacggtgaacaccggctcgcggcgcacgccacgggcgtcggcctgcggctgcgccagcgccccgaactcgtggttggggcggttcgcgccttcgggcgcggcgccgagcgtcagttgcggataccagacgtcgagtgtgttcccggctgcgtcgatgctggccagtccccagccccatgcggtgcgttcgttcgtcatgcttgtctccttggtggatgaacggtagatgcttctatattatgggcagatgggcacgtatgaggctgccgttccgaatcattgtggcgcggtttcgtcacgggagaaaatctagcggggcggctacgatgaaaagctatgagtgactacaggaccgaacgggagcagcgtgagcgccgccgccgcatcatcatgcgtgcggtgtgcatcgtcattgccgtggccatgctcggcagcctggtcattcccgcggtgtatgcgggtctttgacgcgatcattggcgtcctgccgtgacgcgaggtgcttgagatttcgcatatggtcggcagcgtcgtcacacaatcgattcgttcacaagttcaatgattatggtggtattcgatggcagaatttgatttttcacaggcaatcggcgaggcacggtcgaagtatgagtccattgcgaaggcgttggacatcgaacggctgaagtcgcagatcgcgacgttggagaccgaggccgctaagcctggtctgtgggatgatcctgagaacgcgcagaaggtgaccagccgcctgtccgcggctcaggcgcagctgaagcgcctgaacgaggcgaaccgtcgcatcgaggatgtcgagacgctggtggagctcgctcaggaggaggctgacgccgattctctgagcgaggctcagtccgagatcggctccatcgcccaggagctggatgacatggagatccagacgctgttggacggcgaatatgacgagcgttccgcggtcgtgacgatccgctccggcgcgggtggcgtggacgccgccgatttcgcccagatgctgttgcgcatgtacctgcgctactgcgagcgcaacgggttcaaggccaaggtgatggatacgtcgtacgccgaggaagcgggcatcaagtcggccacgttccaggtggatgcgccgtatgcgtatggccgcctgagcgtggagggcggcacgcaccgtctggtgcgcatcagcccgttcgacaaccagggccgtcgacagacgagtttcgccgccgtcgaggtggtgccgctcgtcgaggcgaccgatcacatcgacattccggacaccgatatccgcgtggatacgtactgctcgtccggccccggcggccagggcgtgaacaccacgtattccgcggtgcgcatcacccaccttcccaccggcatcgtggtgacgatgcaggacgagcgctcgcagatccagaaccgcgccgccgccatggccgtgctgcagtcccgactgctggtgctgcgccacgaggaggaagcgaagaagaagaaggagctcgcgggcgatatcaaggccagctggggtgaccagatgcgttcgtacgtgcttcacccgtaccagatggtcaaggatctgcgcaccggttgcgagaccagccagacccaggccgtgttcgacggcgatatcgatgcgttcatcgaagccggtatccgctggcgtcacgagcagcgtcgccaggcggccgaagaggaagagtaaaccgtgacttggctcccggctccgggggcgagtgaggagacgatatggcactcatcgcattggatcatgtgagcaaggtgtatcccaagggtacgaggccggcgttggatgatgtcaacctcgacatcgaacgtggcgatttcgtgtttctggtcggtgcttccggttctggcaagacgacgctgctgagcctgctgctgcgcgaggaggaggccacggacggcgagattcgagtggccggcaatgatcttcgccgtctgacgaaccgtcaggtgccgcagtatcgtcgttccatcggattcgtgttccaggattacaagctgctggcgaacaagaccgtgtggcagaatgtggcgttcgcgcttgaggtgatcggcacgcgccggtccgccatcaagtcgctggtgccgcaggtgctgcagaccgtgggattgaccggtaaggagaacaactacccgcatgagctgtccggcggtgagcagcagcgtgtggccatcgcccgcgcgtatgtgaaccatccgcagatcctgctggccgatgagcccaccggaaacctcgatccgacaacgtcgctgggcatcatggaggtgctggacgccatcaaccgcaccggcacgacgatcgtgatggccacgcacaacgaggagatcgtcaactcgatgcgcaagcgcgtcatcgagctgcataccggcaagatcgtgcgcgacgaggcccagggctcgtatgattccgccgagttcttccccgacagcgatgtcgcgtccaaggcgcatgaggcgatcagcgggcagtcggatgattcgcgtttccgccctgattccggctcgttcgacgcacaggtcaccactatcgaggcccgtggcgaggagggtgcagtcgagggtatcgaagtggtcgccaaggcggtcagcggcaatatccggaacgaaggcatcgcccggttggcgagctccgtgcattcggggcgtaccggccgctacggtgaggcgttccagtcggtggaggacacgctgacctggggcaagggcctgtcgcttgagcagattgccgcgcaggaggagcagaaggcccgcgccgagcagggcggggatgaacactccgatgccgcggctcagtcgagcgaccgggcgacggctcggggtgatgcccggtccgcgcagccggaggacgccgcccagccggaacggcacgagccgccggaaccgccgcattcggcggatgatgtcgcaccgcatggtcagccggagacggagcatcctcaggatgaatccacatcccaaagcgaacaggccggttcggcggcggagccgggctcctcgtccgatgaggagggcgagacgaagccgaggcgcgcgcacaagctgccgccggcgccgccggcccaaccggggcatcgcgacaggcatgccggaaaggccggtagcgctgatgatgccgacggtgctcgcaacgaggaggacaatcgatgagaatgcgttttatcctgtctgaaacctggaccagcctgcggcgcaacgtgtccatgatcatctcggtcatgctcgtcacgttcatctccttcgtgttcatcggcgcgtccgtgctgatacaggcgcagatcaccaaggcgaagggcgactggtacgacaaggtcgaggtcgtggtgtggctgtgcccggacggcaccagccagtcggcgtcctgctcgaccggcaaggcgccgacccagcaggagatcgtggatcttgaggacgtgatcaacaacgagctcggcagtgacgtgtcaaagatcacgtatatgagccgcgaggagttcttcaagaacacgttcctcaagcagtacccgaacggcgtgtacgagggacgtaccctcaccgcctccgatatgcaggattcgctgcgtctcaagctcaaggacccgaccaaataccaggtggtgtcggaggtgctgaccgggcgcacgggcgtggaggcggttgtcgaccagcggcagatcttcgacccggtgttctcggtgttgaaccgggccaccgtggtcaccgtcgtgctggccggtgtcatggtggtcgtcgccatcatgctgaccgcgacgacgattcgcatgagcgccgcctcccggaagaacgagacagagatcatgcgtctggtgggtgcttcgaactggacgattcgattgccgttcatcctggagggcgtggtggcgtccctgctgggatcgctgctggcggtcggcgcgctgagcggcatcgtcaaggtgttcgtcaccgattggttggcgaccagcgtgcagtggatgccgttcatcacgcagacgacggtgtggctgaccgcccccgtgctggtggtgggggccatgctgctgtcggcggttgcgtccgcggtatcgctgcgacgctatctcaaggtgtgacttgccgccgcgtgtcgtccgggatgcgcgaagtatgagatgaatcatttcgctgccggatgacacgcggcgcatttatccagtttaattcgttacaatacgttcaaatacggcattaatggaagggcgacaacaatggtgaagatggcgaaacgtgggggtacgttcaccgctttggcgcttgccgccgcaatggctctgggggcgggatcggtggccgtggtcgccccgcccgagcaggccgctgcggttacggagtatgaataccagcagaaggtatcgaaccacaacagcctcaagaagcagctgaccggcgtcgattccaaacttgccgatctcatcatctcgttgaatgacctgaccgagaaccagattcccgccgcgcagaaggccgtacaggaggcccagcagaaggccgaacaggcgaagagcctcgcagaggcgactacggcgcggcttgaggcggcgaagaacgaccggacctcgcttgaggagaagatcaagcagaccggtgaggattacgatgacgccaaggatgcggtcgctcagctcgcgcgcgaaagcttccacggctcggacgcctccaccctgatggacgtggtgaccaatgccaccacgaccgaggacttcgtcaacaagatgcagtcggatgccgctgtcacgcgcagtgaggcgaatgccgccgacgccgcggccaccagcctcagcacgtcgatgaaccgcaaggaacgtctcacggccatcgaggacgagatcacccagctcaagggccaggcggacagccaggcggccagcgcgcagcaggccgctgaggatgcggcgtccaagcagagtgagctggaggccttgcgcaagaagagcgacgaggaacgcgcccagctggaagcgcagaagaagagcctgagcaccaaggaagcacaggaggccgccgaactggtgtcgatgaaggccgagatcgattcgtggagcgtgcagaacaacaccggttcggcgaatgccggcaccggcggacagcagcagatcaagcccggcgccggcagcgggtcgggcagcggctccggttccggtgccggctccagcaagcccggttccggttccggcaagcccggttccggttccggcaatggttccggttcgggcggatcccagcccggcggatcgggacaggccaacggcatgaactacacggtgcccggcaactgctatgagggcatgccggtgtgctacgggcacaggaccggcaacacggtgggcggcagcgcctacccgtggagccagtgcacgtggtatgcgtaccgtcgccgcgtgtactactaccatctgcccaccggctcatacatgggcaatgggcaggattgggcgaacaccggccgcagcctcggctatctggtcaaccgcacgccgcacgtcggcgccgcgatggtgttccgtgcaggccagctcggcgccaacagccgttacggccatgtggcggtcgtcgagcgtgtgaacagcgacggatccgtgctgatctccgagtgcggcgccagccttcagggcgtggcgcaatggcgcacgatttacaatgctggtaatttccaatacgtgcattactgagttccgggtggtgttttccgattcgtccggtcacggcccgtgcaagcgggtctggtctcatgatgtctgtgttgatgtgagtgattgaagaggaagaccatggcaaaggaacagggcactgtgctcatcgcacagaaccgcaaggcccggcatgattacctgatcgaggacaagtacgaggcgggactggtgctgaccgggaccgaggtcaagtcgctgcgcgaggggcgggcgtcgctcgccgaggcgttcgtctccattgaccgtcggggtgaaatgtggctggaaggtgccaatatccccgaatatctcaacggcacgtggaacaaccatgcgcccaagcgcaagcgcaagctgttgctgcatgcgcagcagatcgtcaaactgtcccgtcagatcgaggccaaggggtacaccatcgtgccgctcagcctgtatttcaaggatggtcgggcgaaggccgagatcgccctcgcacgaggcaagcgcgagttcgacaagcgtcaggctctgcgtgaggagcaggacaagcgcgaggcgctgcgtgccatgcgctacaagaacatgcgctcccggtgagagccgacgggcggaaagcgctttggacagaccgcaccggtgggtgagtgaggagccccatatcccgttcgatatcgacgtggtgtatgaggatgccggcatcatcgtcatcgacaagccgcatttcctcgcgacgaccccgcgcggcatgtggtatcggcagaccgcgctgattcggcttcgcgagatgttcgacgagccggacatcacgcccgcgcatcggctggaccggctcaccgccggcatcgtcgtgttcgtgagggatccagcgctgcggggcgcataccagatgatgttccagggccggaaggtcagcaagacctacgaatgcctggctccgtgccggccgacgacacggccgcgatacggcaccgtcgagcggctggaccctcctgccgtgttcccgctgcgccgacgttcgcacatcaccaagctgcgtggcgtgctgcaggcgttcgaggagccgcaggccgtcaatgccgagacggtgatcgatctcgcggcgggaggatatccctcgatgggcgggcgcttatgccacgggaggaacggtctgcgcgcctacgagctgcacccgctcaccggcaagacccatcagctgcgcgtgcacatgaactcgatagggttgccgatccatggcgatgatttctatccgcgtatcgtcgaacgcgcctatgacgacttctccacgccgctggaactggtcgcgcggtcattgcgcttcaccgaccccgtcagcggggagccgcgcgaattcatctcccgcatacctctgggttggtgaagtttacttcactttttctgttgacgtattcgcgtcttggcggtaatatgaagttaacttcatgagaagtaagcttcatgttatggaaggaattgattgaagacaagagtgagagaactgcgaaaacaatcaaagctgacgcaacagcaattggccgacttggtccatgtttcaaacagaacgattatttccatcgaaaaggaacaatatagtccatcgctaatgttggcctaccgaattgcggaagtgttcggcgtgactgtcgaagaattatgttgtctcaaagaaaacagggaattggaggataaggatcaggaagcgaattaacaatgtgagaagtttcgttacggcgatcgtggttctgattctgggaattgcctgcttgggtatcgctgccttccgcggtatggcaacaagatttcctatagccggaattgttccgcttgcctggagtgtgattgatttcttcttcgcctttactcaatcaagtattgacagccaagccgaaaaggtcacggacgaacgcgataggtatattgcgatgaaaagcagcaggaaagtcctgctgatcgccaattacgtaattggtgccggtgaattccagaggcagcagatggtattccgggtcgtcggggtctggcccctcatccatgaatccgaagcgagagaacaaatccatgcttggcttgttgcgcggatccacttgagtcagcacgagcggcgtgcgattggaacgccacgcatcatcacgaagcctcataatcaccgaggcgagcagcgtgtctccgagatgttgccccgtaccttcagctcggtggcgatgtacgaaatctggtagatgccttcgtgctcctcggtggtttccacgccgacaccgtattcgcagaagccgaccacttcatcatgcaggggaatgtccccggatacgacaagaagcgtgcgcataactccggtcggggtcttgcgcacgcagagaccgcgtatatatctctgtggatccatcgcccattcggggtctcctggcttgcagcacaggaactgtctgagggctgtctgatggtctctggagcattcacgctcgatgacgagattcagattcatcgacggtgtcttcccgggtgtttgccctgcgtgacagatagtggcgagcgctgttggtcagcttcatccatttctcgtccactgcgttgcgcggcttgccgtcctcaggcggcgcgtatgccggaatcagtttcacaccggtgcctgatattggcggtgttccgccgtttcgtaatgtgtgggcaataagggactcgaacccctgacatccaccgtgtaaaggtggcgctctaaccaactgagctaattgcccgcagactcacactgtatcgtatagtctgtatcgggacgccggccgagtgtcgttgggtggaattccgccgtcggtcgaaccgtggcgatgctgtgcttgccggcgcatgatatatgccgtaatcgtgcgaaagacgtgtgaggatgccgttttgctgggccaaatgtgaagctgcgtctcaacactcacgtaaagtgtgcaagagaagtactatccgtaggaggtcgatacaccaatggcgcatcaagacggggcagataaaggcgcatcggggatcgctcgcgttgggaagcgcaaatggggatacgatcccgatcaggtggacgctttcctggatcgtgcacatgcgctctacgagagcgaggatgcccatctcacgcagcaggacatccagaacgtgtccttcgatctgagcaagggcgggtatgacatcacccaggttgatgcggcgctgtcccggctggagcaggccgtggtcgacaagcagacgacgcgggagattaccgagcacggtcgtgtggcgtggaaagcccagaccgaagagctgtaccgtcaggtatgtgagcacgccgaccgcggcacgggggagcgattcgcgcgcggacatgatcgccggccgtcgtacgaccgcaagcaggtcgaccgactgatcgaccagatcgtggacaaggccgccgcaggccttggcgtggacggcgtgagcgaacaggacgtgcgcaagctcgccgatctgaattccggtgccgtctccaacgtggtgttcacgcagcgcaagggcaagaacggctatgacgagcgtcaggtcgattattacctcaactcgtgcgtgcagttgctcagccgtctcgaatcgttcgcgcgcgtctccgattatgtcggtggcggtcacgaatccggcggcagccggcgttcgtccggtgcaaggatcgcctccgacgcgggtgtgacgccgttgttcggcgcggacaacgcctatgcacatgcgccgtcgccggcgcggcaggaagcggagcctcagtccttcgcgcccgcgaacgaatcgttccatgccctccatgaggcagaggaggcgctgttctcatcgcagacggccgacgagccgagcgtcgcggccgatgcgcagtccgttcctccctcgttcgctcccgccggcatgtccggtacggtcgtatccgcgcccgcctcagcgcttccgtccacgttctcggacggagcctccgccccggagccgcagtcgtcgttggcggcgctgtcccggcgcaccggcagaagcgtgagttcgagcaacgtgagcgcggatcatgccgcggctcctgccccggcaccggagattccgtctccggccatcccggcggcaccggcatcgttcgccccctcgcacgccgcggtatccgatcagccggccgcagtcgccgagccccaggctcccgaacgcgtcgccaagtccgtgaaggttcccgcggagccagttgcagccgcacccgccgttgctccctccgcgccggcccccatgccggtcttcgatcagcccgtggcctccgacgcccataccgatgccagtgtcgaggccctgccgtcgttcgcgccgtcctcgtcgccgtcggcgaacgttcccgttcatgccgtagacgatgccgcgcagacgcaatccgatggctctcacaagtcatcgtcggatgacctattctccagcatgtacctcagcccggaaagcaagctcgatttcgacatccccgacctgtcgttccccacgctcaacacgggcgagttctatagcggactgagcggtttcggcaaggacaacgactgaccatttcgtcggcgcgggaagacagatacaccacagaagacataaagaagcattgcaatgagccagtataggaatacggttgtcattctcggatcgaccggttcgatcggcacgcaaggtctggatgtcatcagtcggcatccggagcggttcaccgtcaccggtctggccgccggaggcgcgcatgtgcggcttctggcacagcaggtcgtacgtcatcatgtgccgcaggtggccgtatatgacgaggccgccgttccggcgctgcatgaggcactcgaggaggtcggagctcggtacacgcagattcaggccgggccgcaggcggtcaacgccatcgccggttccggtgccgacctggtgttgaacggcatcacgggctcggtcggactcgaaccatccattgcggcgctgagggctggttctcagctggcgctcgccaacaaggaatcggtcgtcgcaggcggtcacctgcttttcggcgcgcaagtgcgcgatgaccagatcaatcccgtcgactcggagcattccgccatctggcagtcgctgcggtccggcacccacgccgaggtcagcagactggtcgtcacggcctcgggcggtcccttccgcggctggaagcgcgccgacatgagcgacatcacccctgaacaggcactcaaccaccccacgtggcatatgggacccgtggtgaccatcaactcgtccaccctgatgaacaagggactggaggtcatcgaggcgagccgtctgttcgacgtggcgccggatcgcatcgtcgtgaccgtgcacccgcaatccatcgtgcactcgatggtggagttcgtggacggagcgaccgtctgccaggcgtccccgcctgacatgcggctgccgatcgccttgggcctgtcggcgcctgatcgtctgggtgatgtcgcggcggcgtgcgactggacgcatgccagcgagtggacattcgagccactggacgacgaggcgttccccgccgtcgcgttggcgcgcgagtgcctacgcgcgtcggagaagcataccgcggtgctcaacgcagcgaacgagcaggccgtgcatgccttcctcgaccatcgactgccctatctgggcatcgtcgacacggtcaaggaggtcgtcgacgcgatggacggggagcttcgcggcaacccgctgttcgcatccgtggaggaaatgggtcaagtcgagcgtgaggcgcgccggcgagccgatgatttgataaacagtcagaagtgaatcattcgcgcgaccgcgcccggattgatggcatggcacagccatgcgatcaatcagtcatgccccggcatggatgtggtgtcgcgcataatcgaacaggaaagaccaatcatcagcatgagcgcgttgccgcaaaccagtgcacagacgtccgcgaccacaggaacggcgtcggccgtgacaggatcgttccgcaagaccggagagccggatatcagcgagagcccgttgcatccgcgccgcaaatcgcgtcgcatcatggtcgggccggtgccggtcggcggcggcgcccccatctccgtgcagtcgatgaccaacacgctcaccgcgaacgtgccggccacgctgcagcagatcgccgagctcaccgccgcaggctgcgacatcgtgcgcgtagcggtgcccagccaggatgacgccgacgccttgccgcagatcgtcgccaaatcgccgattccaatcatcgccgacatccacttccagtcgaagtacgtgttccaggccatcgacgccggctgcgcggccgtgcgcgtgaatcccggcaacatccgcaaattcgaccaggtcggccccgacatctgcaaggccgccaccgacgcgggcgtcagcctgcgcatcggagtcaacgccggatcgctcgacaaggagctgtacgccaagtacggcggtcccacgcccgaggcgctcgtcgcctccgcgctcaaggaagcccacatgttcgaggacgtcggcttccgcgatttcaagatatccgtcaaacaccacgacgtgattacgatggtgcagacctaccggctgctcgcatccaagggcgattggccgctgcatctgggagtcaccgaggcggggccggcatggcagggcaccatcaagtcatgcctcgcgttcggcgcgctgctggccgaaggcatcggcgacacgatccgcgtgtccctgtccgcaccgcccgtcgaggaggtcaaggtcggctgcaagctgctggagtacatgggactgcgcaagcgcaagttcgacatcatctcatgcccgagctgcggtcgcgcccaggtcgatgtcatccagctggcgaacgcggtcaccgagggactcaagaacgtcaccgcgcccattcgcgtcgccgtgatgggatgcatcgtcaacgggccgggagaagcccgcgaggccgatctcggcgtggcttcgggcaacggcaaaggacagatcttcatcaagggcaaggtcatcgagaccgtgccggaagaccagatcgtcgagacgctgctcgcgcgggccaacgacatcgccgcccagatggaggccgacggacaggtgccggtaggcgccaccggccctgtcgtcatccccatccagcatccgaacgcgatgaacgccgttcgctgaggtttttcattggcgtccggccgccgtcgccgccggcatccggccggacggcctgagcgcggccggatgtcgtcagctcacagcgcagaagaccggcggattggctagtatggttgcgtgttgaatcggcagcgtaacaggtttcgtatccgccgcggcgaacgtcccgcagacgggaagtcgcgcgtatccgacgaatcggccgcatcgcggcggcaaccgggcgacaaggcgtcgccggccgcctggacgcgatggcaccgtctgatgtgcaccgtgccgattttcatcatcctcatcggcctgctggtgttcgtctccaatgcgacggccatgccgtggaacaatgagcccacagggcagactttgtcgacactgtccgccgataccggcgtgacgttcgacaacccgggcggcgttcacctcgccaagcgcggcgagtacgaggtgagcgagcggtctgtatggttcgacgcgaagagaccatcaacgggcgagatccaacgcacgcatgtcatcatccgcgagcctgtcggcgtctccgggaagctgcccggcatggtgttcatgcacggcgcgggctacggttccgccgtcgattcgttcgtcgacatggcctatgacctgtcgtccgcgggattcgtcaccgccgtgctcgacaagccggtatggtccacgaacgacataacgcgcgattatacgggctcggcggccgtctatgacgaagtgatccgcatgttgcgcggcctcgacaacgtggatgacagggaggtcggcatctacgcgacctcggaatcgacatgggtgtcgtcatatctgctggacatggacaaggacatcgcgttccaggtgctgctcagcccgatggtgttcacgccgcgacaggcgatagggttcctcgccgcacaggatttcgcgctggtcggagcccatgacggataccagtcgatagtccggcgcgtgttcaacatcgattccgcgctgttcggcgtcacgcttcccgacgtccatacgctcaagccgagcgcgtattcgattccgacgctggtagcgtatggatcgaaggacgtgatgaccgcccaggtggagggcgtggaggcgatcgtggacatggccctgcgcgcgggcaaccatgacgtgagcatccgcggctatcccgtggccaatcatgtgctccggttgggcgacgaatccgaaaccgggacgccgttcgcggaccagtacgccgctgacgtggtggattgggcggtcggcacggcgaagggcctgcgccagacgagcgagcgcgtgggaggcgtgaacctgtatcagtcgatagcagtgccgaaagacctgaaggcgaatcgcggcctgacggtgtacgggctgctgctgcacgtgttcatggtgttcatgatggtgctttcgctggtcatcgccgtggtcgcgctggtggtgaagatacgcgcgatgatccgtcgcaccggtccggcgctggggttctcgcatggtttcggcaaccagctgctcactctgacggtcactaccgtggccacgctggccctgttcggcgccggtctcggacaggtcatcatgggtgtggtgaagattgcctggggcggtgccccgccagagaagcccggactcatgtattggagctggccggtcatccaggtggtgtgcacagtggtggtgtgggcgtggtcccgcgtgttggcccgtctgatcgaagtggcgtcgctgcgcggtgtcatccggttccctccgcgcaagggcgcgatcggggatgtgatgacaggccgtgatccggtgctcgcctcgaccagacttggacgcgtgctgttctgggtgacggccgtcaccatgctgtcggttctgctaatgttcgcgttctggggattgttcgtctactgacggcgttcgccgcagcgaacggtggcggaaccaatggatacgcgaggaacgggaggaagcgcttatgccgctgtatcgtgacgaaggcgtcgtgttgcgtacggccaaactcggtgaagccgaccgcatcgtcaccttgctgacccgcagccatggcaagatccgagccgtggcgaagggcgtgcgccgtgtgaaatcacggttcggcggtcggctggagcctttcatgcgagttgacgtgctcatcgccactggacggaccctggacgtggtgtcgcaggccgagtccatttcggcgtatgcggctccgatctgcgccgattacggggcgtacggcatcgccaatgtcatggtggagaccgccgacaaactggtgtccgccgaaggggagcgggccgtcgcgcagtaccgtctgctggtcggcgggctgaacgcgctggcgcgtcacgcgcatccggcgacggcgatcggggaatcctatgtgctgcgtgcgttggctttggccgggtggactccgcggctgcattcatgcgtggtgtgcggacggcatgtcgccgtctcgccggtcgccggggagagcggcgatgacgggggtgccggggagagccgcatgtcgggcccgatgttcttctccccgtccgccggcgggctgatgtgttcgatcgaccgcacgcccgatgcgaaacgcatcgacccggacgaggtggtgcagctctcggcggcggtcgacggggattggggagtgcttgacggggctccgccggatgcgcgagtgttgcgatttgttgaagactggggcgagtattatctggaacgccccattcgttccttgcgcttgctagattagcggtatggcttttgaaaacgtcgattacacgtcgctggacattccggcggcgccattttccgatcctgcgcgtatcccggatttcccgaagaacaaggtgccccgtcatgtgggcgtgatcatggacggcaacggccgttgggcgcagcagcgcgggctggtgcgcacggacggccatcaggcggccgagcccgtggtgttcgacacgatcgccggtgcgatcgaggccggcgtgcggtatctgagcctgtacacgttctcgaccgagaactggaagcgctcaccgcaggaggtgcgcttcctgatggggttctcgcgtgagatcatccaccgtcgtgtcgcgcagatggacgattggggcgtgcgagtgcgctggtccggtcgccgcccgaagctgtggaagtcggtgatcgacgagcttgaggtggccatggagcgcaccaagcacaacaaggtcatcgatgtggtgttctgcatcaactacggtggccgcgccgagatcgccgacgcctgcgccgagatcgcgcgcgaggtggcggcgggacgcatcaagggcgaccgcgtcaccgagaagatgatcgccgaccacctgtacaaccccgacattcccgattgcgatctggtgatccgcacctccggcgagcagcgcacgtcgaacttcctgccgtgggaggccgcctacgccgagcttgatttcgtgcccgaactgttccccgactgcggccgcgatgtcctctggcgctccatcgaccactacatccaccgcgatcgcagattcggcggcgtgaagaaataggattcccgtttcgccctgtgttggcgggtctgttgtgaggtgaccgggagagcgctcctcgagcgtcaagaccacccccagtttcgctccgctcaacagccccgccagcgggggcgagaagaggaaagctgctcagtagcagtcccaggtgtagaggacgcgtgagaagtcaagccgttccagatcgctgggggagatgaagaagttcgccacgccggagtcgccgaacgacacatcgttggtcgaatcgatctgcagcagcaggtcggtcgccttgttccacagcggatccctgtcatcatgcgggtcgctttgcgtgaagatcgggtatccgccgacctggtgcccgcccgacatcagcagtgcggcgagcgagtcgcgaatctccgcctcatgttcgcggaagaagccgtggtcgtactcgttgagcgtgctgacgcagctttgcagccgtccctcgaaccggtagtcagtaggcgtgatcgtctgcttgccggcctgtgcgactagccgtcgctcggtgttggggtcgttgaacggcagcaccgtgtcgtcatgccaggcgggtttgacgacacggttggcatgcagtgcggtgaccggcacgttggggaggtagcgcacgcgccacgagcgttgcgactgcgggttgtcgtagtccgctccgtacagggtgtcctcgccgtcgatgaagaactgcagcagtccctgggcggggaatccgcgcagctgcggcagttggctgaagttcagctgggccagcagatacagcgggtccccggtgtcgagattgcgtggcgccttcatgccttccggcacgtagaacgcgccgccgagcttgctgtcggtgatctgtgcgggggagtcgtcctcggtcagacgcagcaccggcatttcggtggaataccgcagcagttgcgaaagtttctcggcgacgtagtcggtgatcctggggatgtgcgcggtgtcctcgtaggcggcgtttcgctgggatctgccggtgacgccaagctggtcgatggggttgcggggcccctctttgtccactttccctacgatttcctgggacggtgtgtcacgaccgaataatttgtccagcaatcccatgtgattccccgttttcagatcatcatccttgcacaggaaagcctagcagctgaaaggcgatttcgctgacgcgattggtgaaggcttggtaccgtcttgcggcgtgtcttcccgatcgcgtcagcggattggcctcagtcagtccaggccgattgacttgagatgatgcagcgtcagcgaggtgacggtcagcgagccggattcggcgacgagcatgatctcgcgcggcagggtcagctgtccgcaacagccgtcgtcctgcatggggatcggctcgacgaaggggctcatccacccgtacatgatctgccgcccgttcgtgttgaacgactgcggcgcgtagaaattgtggccgcagtcccacgggcggaactcggtttccggcttaaactcgccgtccttctcctgttcgagggatggggcgaaggcgatgggctcgcggcgctaggtgaccatgtcctcgctggagacatgaccccaatggcacaggccccactgggtgccgtaggggtgcagctggtagaacacgtgccagcggcccttgtagtagcacaggccgttcgggtcggcctccttgcggagctcgtccttctgctcggacgggacccggaacaggtagatgagcagcatgccgaggccgcaggcggccatgaagccggccgacagcacgatggagccgatcagcgcgcccgtgcgggtaggtcttgtttggtgctgagggttctccgcacggctgccgtgccgttgcggggaatcgtgttttgtactggaataatataacgtcaatcgatttacgtcaaacgattgacgttgtgtgtcgtgctgcggaagagggtttccggcgaggattaacggaacatatctaccggtgagtgcggcatgaggtaaggtggaacgcatggctggaaacttcgtgcaactgcataaccacacgcactactcgctgctggatggggcatccaaggtgcccgatctggtcaagcgcgtcaaggagctgggcatgccggcggtcggcatcaccgaccatggcaacatgcacggcgcctacgagctgtggcgtgcagcggtcgattccggcgtcaagccgatcatcggcatcgaggcgtatgtgacccctgaaaccgcgcggcaggacaagacgcgcgtgtcatgggacaccaactggaccccggttcccggccatgcccgcaaccccgacgatgtctcgggcggcggcctgatcacccacctgaccatgtgggcggagaacgacgaagggctggtcaacctcatcaaggcgtcgtccgtcgccaacctcgaaggccgtgtcatgcgatatccgcgtatggacaaggaggtgctgtccacctactccaaaggcgtgatcgcctcgtccggctgcccctccggcatcatccagacccgtctgcgcctaggccagttcgacgaggcgctgcgtgccgccggcgagttccaggacatcttcggcaaggacaatttctacatcgagctgatggaccacggactgtccatcgaaagcaaggttaccggcgatctgctgaccatcgccaagaagctcggtgcgcccctgctcgccaccaacgactcgcactacgtcatggaggcggacaaggacgcccaggacgccatgctgtgcatcaactccggcgccacgctggacgaccccaaccgcttcaagttcgaaggatcgggatactacatcaaatccgccgaggagatgcgcgagctgttcaaggaccatcccgacgcctgcgacaacacgctggagatcgcggaacgctgcaacgtgatcttcgacgaccatgaggatggcgcgttcatgccgcagttcgactgccccgaagggtgggacgagacctcgctgttcctcaagaaggtcgaggagggcctggagaagcgctacgacggcaacccgccgatggaggtgctcaagcaggccgactatgaatgcggcgtcatctgccagatgcagttctgcggctacttcctcgtcgtcgccgactacatcaactgggcgaaggagcacggcgtgatggtgggcccggggcgaggctccgccgcaggggccatggtcgcctatgcgatgggcatcaccgagctcgatccgctcaagcacggcctgatcttcgagaggttcctgaaccccgagcgtgtgtccctgcccgatatcgacgtcgacttcgatcccgaaggccgcatgcgcgtgctgggctatgtggccgacaagtacggccatgacaaggtcgcccaatgcgtgatctacggcaccatcaagaccaagcaggcgctcaaggactccgcgcgcatcatgggattcccctttgagatgggcactcgtatcaccgaggcgctgccgccggccgccaccggaggcaaggacatcagcgtgcacgacatcttcgacccgagcgccaagcgctacgccgaggcgcgcgaataccgcgagctgtacgactccgatcccgaagtcaagcgcatcaccgaggaggcgaagggcatcgaggggctgattcgccagaccggagtccacgcgtgcgccacgatcatgggttccgcgccgatcaccgacacctcgccgctgctggagcgcaccgacggcaccgtcaccaccacgttcgagtaccatacgtgcgaaacgctcggcctggtcaagatggacttcctcggcctgtccaacttgacggtcatccgcgacacgctcaccaacatcgagcacaacggcaagggcgtcatcgactacacgaagatccctctcgatgaccgggagacgtaccagctgctgtcgcgcggagacacgctcggtgtgttccagctcgattccgacggcatgcgctcgctgctcaagacgctcaagcccgataacttcaacgacatctccgcacttattgccctgtaccgaccgggcccgatgtcgatggactcgcacaccaactacgccaagcgcaagaacggcctgcagaagattacgcctatccaccccgagctcgacgagcccctcaagcaggtgctcgatgagacgtacggcctgatcatctatcaggagcaggtgcagtcagccgcgcgtatcctggccggctattcgctgggcaaggcagacgtgctcaggcgagccatgggcaagaagaagcccgaggtgctggccaaggagaaggtgccgtttttcgccggcatgaaggagcatggctattccgaggaggccgcagaggcgatctgggagatcctggtcccgttctccggctatgcgttcaacaaggcgcactccgccgcgtacggcctgatctcctactggaccgcatacctcaagacgcactacccggtcgagttcatggccgcgctgctgcagggcgcggcgaccaacaagaacaagaccgccctgtatctgggcgaggctcggagaatgggcatccaagtgctctccccggatgtcaacgagtcggtctacgagtactccgcagtcggcgacgtcgtccgattcgggctcggggctatccgcaacgtcggcgagaatgcggtcaaggacatcatcgcggaacgcgagacgggccgtggcaaatacgtgaacttcatggacttcatccgccgcgtgccgttgaccgcgctgaacaggcgactggtcgaatcgctgatcaaggcgggcgcattcgattcgatcgacccgaaccgccgggcgctgttcaccgtgcacgagtcggcgatcgactcggtggtcggcctcaagcgcaagcaggcggaaggacagttcgacctgttctccgacacggaggattcgggcgccgacgcgatgggggatgcgacggtcgccgtgccggacatcgaggaatgggacaagaaggacaagctcaagttcgagcgcgatatgcttggcctctacgtgtcggaccatccgctgagcggcatgcaagcagtgctcgccgggatgcgggagatgtccatcgcccatctgattgaccgtgcgcccaccatgcccagcgggcagcaggtcacgctggcgggactgattaccaacgtcgatcgacgagtctcgaagaagggcaacccgtgggcgatcgtcaccatcgaggacatggaaagctccatccagtgcatgttcttcggcaaagtgtacgaggcggcgagcacggagctcatacaggatgcggtcgtgcaggtgcgcggccaggtcgaggttcgggacgagaccgtcagcatgcgcgccacggaaatgcagccggtcgcgctggagaccgatgacgagcgtccgttcctgatcaccttgccgctggtggccctggggcgcggcaacatgcagcagcttgcgcagatcatcacgcggcatccgggattctgtgaagtgcggcttgccgtgctcgacgccaagggcaacgcacgggtgatgaccttcggcgataggttccgcgtcaaacgcgacaccagcctgttcgccgagatcaagagcctgttcggcccgagctgcctgccgacggcctgagaccatcagccggaatgtgaccatatgcgctacggaatccgctgacgatgggcgtatgcaggtagaatgagagcgaaacggggccgctggctgccgtcaattatgggcctggacctagagggaagaacgatgatagtgtgttcacattgcggcgcagacaacgccgttggaagcttgttctgcagggcgtgcggtgcacaattgacggcggcgacggcacagccggccgctgcggcaccggcgacgcctgcgtacacgacgcagccgcagacttcggcttcgcaggttcctcaatcggcacaggttcctcaatcagtgcagtatccggcgcagccgccgcaaccggtacagacgaccgggatgcctcccgttcccgcgcccgccgttcccgcggcgcccggcaccgcttaccagcagcagccgcaaatggccggataccagcagcagccgtatcgggctcagacgtatccgcagcagccggtcgattcccagcagtacggccaataccagcagccgggcgtccccggagtccccatggctcccgtggcaccggtcgcgcagaagaaatccaagaagccgctcatcatcgtgctcgccatcatcatcgtggccgcgctggtcaccggtggcgtgttcctgttcctgcacctgtcccagccgggcgtcaacggaacgtattcactcagcgccggcggcaacaccggcaccctgagcgtcgacggaaagaagatgtcgcttgatctgccgggcaatgacgacggaaagccggcggtcagcgccacgatcgacaaggtcacaagtggcaatggcagccattcatacacgctgaaggatctgaagttcagcggtgcgagcggcaattacgtgatgtccgaggtcaccggcctcatcgggtacatcggcggtctgggcgaggaacagggcacggccgttctcaacgcgctcagcccgaccgtcaccatccccgatggcgcgtccaagggcgagccgaacggcacctggtcggtctcctgctcggtcatgggactgggcatgggcatctcagccaacttcaaggatgatggcacattgacgatgtcggtacaggccaccggtcatggcgagtcgacgctccatggcacatggagcaagaccggtgacgcgacattcgacgtttccctcgatgatcccgatatgactatgacactgtcattgaagaagtgacctgcacgcgctgaaaatatggttgtggccccgacacgataccggtgtcggggccacaaccatattcgcgcacgaggaattcggccgccgtcactcgcgtgcgaggcggatgtgctcgatgtcgttgcgtgagcttttgcggtacagcacgaaccggttgccgatgacctgcaccacctgcgcgccgatctggccggcgagcttgtcggcggcctccttcgccgtcagaccggagccgtcctgcacggcgaccttgagcagctcgtggctgtccatcgtctccgatgcctgcttcaccgcggcgtcggtcaggtcgttcttgccgatgtagagcagtgggttcagctgattcgccatcgcgcgcagctgcttgacctgcttcttgctcaatgccatgtttggtcctctccgtcaatctgatgtgctgtgtacgaggatagcggagcggcacgatgaacggcatggacgcttctggaaatccttcaaaacaccgactaatgtctatggcggggacgaaagaaatgcgacatcatgtctggtaatgatgtcgcagacatccacaatatcctcaaggaggcggaatatgtattattccagtggcaactatgaagcgttcgcacgaccgaagaagccggcgggtgtcgacggcaagtccgcgtacatcatcggcacgggacttgcggcgctgtcggcggcctgctatctggtgcgagatgcgcagatgccaggcaagaacatccacatcctcgaaaaggacgcggtggccggcggggcgtgcgacggcgccgacatccccggcctcggctatgtcatgcgcggcgggcgcgagatggacaaccacttcgaggtgatgtgggacctgttccgctccatcccgtcgatcgaaaccgaaggcgtctccgtgctcgacgagtattactggctcaacaaggacgaccccaactattcgctgtgccgcgccaccaaggaccgcgggcaggatgcgggactccagggcaaattcgggctgagcgacaaggcctcgatggagatcatgaaactgttcttcactccggacgaggaactgtacgacaagccgatcaccgatttcttcgacgacgaggtgctgaaatccaacttctggctgtactggcgcaccatgttcgcgttcgagaactggcattccgcgctggaaatgaaactgtacatcaaacggtacatccaccacattggcggtctgccggacttcagcgcgttgcggttcacccgatacaaccagtacgagtcgatgatcctgccgatggtgaagtacctcgaagcgcacggcgtgcagttccactacaataccaaggtcgagaacgtcgagtttgcgatcggcggcgggaacggacccgaacgtgagcgcaccggggtcggacaggacacgatccagaagatccaggccacgtccggcttcttcaagcgcaacccgtacggcacgaacacgaagaaactcgccgtccgcatcgacatcgaccacgaaggtgacaagtcgtccatcgacctgacgcagaacgatctggtgttcatcaccaacggcggttgcgtggagaactccacgatgggatcccagcattcgccggccgcatggaatccggacctcaagcccggtggcggttgggacatgtggcggcgcatcgccaagcaggacccgagcttcgggcatcccgacacattctgctcggacccggatgccaccaagtggatgagcgccacggtgactacgctcgacgcagagattccgccgtacatcaaacgcatctgcaagcgcgacccgttctccgggcgcgtggtgaccggtggcatcgtgaccgtggaggactccaactggctgatgagctggacgctcaaccgccagcagcagttccgtgaccagcccaaggaacagctgtgcgtatgggtgtatggcctgttccccgacaagccgggcaactatatcaagaagccgatgaccgaatgcaccggcgaggagatctgcgaggaatggctgtaccacatgggcgtgccgatcgacaagatcgaggcgctcgcgaaatcccacgcgaacaccgtgccggtcatgatgccgtacatcaccgcgttcttcatgccgcgttcggccggtgatcggccggacgtggtgccggatggcgccgtgaacttcgcgttcctcggccagttcgccgagacgccgcgcgacacgatcttcactaccgaatactcgatgcgcaccggcatggaggccgtgtacacgctgctcgacgtggaccgcggcgtgccggaggtgtggggcagcgtctacgacgtgcgcaacctgctcaacgccacggtcaaactgcgcgatggctccccggtcaccgatatgaagctcaatgtcgtggagcgcgccgttatgaagaaggtcctcaagaagctcggcaagaccgacatcggcatgctgctgcgcgagtacggggcgatctgacggcatcggcctcgcagcgaaccgttctcattaggaaacgtgtgaggattcctcgcgtaaccgcacaagtgaacatttcggtaaggtccggaattccgggcctctgaagggttccgtgttcgtttggcggaccgcagggctcgcacgtttcccaatgagaacggttcgctgcgtatcgcgggctgtacgccccgcctgatgcaatgctctcagcgtctgcagcagttgctcctgcaaggccgtcctgccggcgaagtactggaagtcgtcgatgagtaccatgtcgatatgcctaaaccggttgccggacagggtgatccggtcttgttgcaggtcggcatcctgcgccgtcatgacgaattcattggcatgatcctcactggtgagatagaggtacttcgcggaagggagtcagcgcgagcgtctcgaatgtctgatccctgttcagacgtgcagtcagattgatggcgggcatgatcgtctcctgtgggttgctctccattcggtagacggattcgcctcaccgaatgcggggattccaacatagggtccgattcacttatccggtagatatgttcctcttattgttgcgcgtatgtcgacgccagatattccccggtatcgtgcagcatcttgcgcaatgaagccggcgacaatatctcgatgatgtgcgaatccgcgtactgcaacgcccaccaaagggtcgcgtgttcgttcgcgacgacgtgcacatcgtattcgcgctcgccggtctggacgacatcggcgtcggcgaaccagtcgtacagcggttcaagcgccccgtggatcttcatgtggatcggcgtcgccttgccgtccatcggataaggtcgctcgttcatatgccgcacgatgtcgaacggttgccccggcgtggggctgaagctgtcgagcgtgcgtttgagtgagtggtctggcccctcaatggacaggtcccggatgcgttccacatgcaggtaggacagcgagtcataccggtgcatgtggcacagcaggtagtatttgctgttcttgtacatcaggtggtaggggtccgccagatatgtcttgatgtcgccgtcgccgttacggcgggggacgagattgccgttgacgtcgtacgtgcagtaccggaaccggatcacgcgcccgtatgcgatggcatcgttcagaatctcgatgttgttgaggaactccgtattgtagttcttgggcgtggtgagttgttcgaggccgcgcaattggccggatttgccggcgaacgtgtagatcttggcgatgagttcgcgtaggtattcgctgtccgagctcgacagcgccgcgccgtccacgagcaggcgcatctgcgcgatgtcgaagaccggttcgatgtaccagccgggtcgggggttggcgctttccgcgttgaccagatcccgccggtcgaggtggcccacatggcggtcgaacggcgtcatggactgcaatgccttgagatgcccgcgcacggttttgtcggatacattgatgcgtttgctgatttccgcggcagtgaggccgtgctcggggtcggtgtgcttgatgagctgttccaggatttcgatgacgatctgagcggtggggagtgccgatgatgcagccacgatgtctcctctcccttgacggataccgtgccacctgggtgattaaaacggtagataactaccggtaatcatatcatcgcctgttgcgtgtggcgtatcgctctcaatgagagcgatacgccacacggataaggatccatcagaaatcgaaattgtccgggtcggcgctgttgcgcttaccggtgtccatggcactgatcgcagccatgtcatcgtccgacagcacgaagtcgaacacgtcgatgttctgcctgatgcgatcggcgtgcgtggacttcggcagcacgacgacgccgcgctggatgtgccagcggatcacggtctgcgcagcggacttaccgtacttcgcgccgatctcggccagctcggggatggcgagcaggtcgccgccggtgccgcccagcgggctgtacgcctcggtggcgatgcccttggcggacagctcgtccaccagcggctggttggtgaactgcggcgaggattcgatctgatcgacggccggcgtcacgtcgctgttcttcagcaggtcggcgagatgatgcggctggaaattgctcacgccgatcgccttcgcacgcccggaggcatagatctcctgcaggtcgtcccacgcctgctgccagacgtccaccggccagtggatcagatacagatccacataatccatgcccaggcggtcgaggctctcctggaacgcttctttgccgcggtgcgcgcgaatgtcgtcgttccacagcttggtggtgacgaacaggtcgcctcgcggcacgccggaacggcggattccctcgccgacagacatctcgttgcgatatatcatcgccgtgtcgatatgcctatatccgttctccaacgcggtctgcaccgcgtttaccgtcgtgtcgccgtccggcgtgcggaacacgcccagaccgatctgcgggatgaccgtgccgttgttcagcgtgatcgtcgattgaatcgccatgaccattgtctcctgtgatattgccgatgatgcgtcgcagacaattgtaatgatgccggcgaaggcgaatcgacaggcgagcaggcaatgctgcgcccgcaggacgtcccaaatcgcaggtcccggccgggacggggggcgtttcctcgccgtgcccgaccgcgggtgggcaagagatgaacgatgacgcttgcgcatgcatggccgcgtattaccatgagtactggttcgcaggtgtggcgccgtggggtgccgggcggcggcgatcgtccgccgcgaatccgtggggaaacgaggcatatggtgagtgatgacacgacgcgggggcagcaggggagtgccgaggctcaggagctgacgctgaacgacaaggcgcattcggtgattcctcagatagggttcggcacgttccagattccgccggaggacacacagcgcgcggtcgaggaggcgctggagatcggctaccggcacatcgacaccgcggccgcgtactacaacgagaaagaggtcggcgacgcgctgaaggccaccggcatggccggcaaggtgtgggtgacgaccaagctgcgcaactgcgaccaggggcatgattcgacgatggtcgcgttcgaccgttcccgcagcaacctcggcgtcgacgtggtggacatgtatctgatccactggccattcgccgcggcggggttcttcaaggagacgtggcgcgcgctgttgaaactgcgcgacgaaggcgcggtccgtgtgcccggcgtcagcaacttcctgccgcagcacctgcgtgcgctgatcgaggattccggtgagaccccggccgtgaaccagatcgaggtccatcctcggttcaaccagccgggaaaccgtgcgttctgcgcggcgaacggcgtggccgtcgaggcatacagcccgctcggccacggaaaggacatcgaatccgagcccgtcgtcgccgcggcgaaggcgcatgatgtcacgccggcgcaggtggtgctgcgctggcacacgcaggaggggcgcatcatcatccccaagtcgaagcacgtggaacgcatgcgggtgaacctcgccagctccgatttcgatttgacgtcggccgaactggcggcgatcgatgcgctcgacgacccgcatgacaacgtcagcgccgatccggcgaccttcatgcattcccagtcgtgggccgaccagcacgtgcgcggcaatatctgattgtggcggggaggagtggtcggcgggatcacccccagtcggctgcggcttggtctgtgggcgagatgtaagcgggcgtgggttgtgcggaggtgtgcggtatggatggtgaaatggagcgggtcttgccggatgatgcggacgatggtgccgaacgccggtggatcgatgacacgctgaaccggctttcgcgctcctcattccgtgcgaaattcgagttgtcggcgaaggaccgcgcgtatgcgcgggcgaagggcaaggccgtgatcgatcgccatgcccgcgagctgctgcgcgcccgcatcggggcggcgaatccgcgcaacgacgggcgccagacgccgtggcgcgggcatccggtgtttaccgcgcagcatgccaccgccacgtgctgccgcgggtgcatcgccaaatggcaccatcttccccaaggcagggagctcaccgatgccgaaatcgatcgcttggcggacctggtcatggcgtggatagagcgcgatctcatacgtcatcccgccgtctgagctcgtccatcgtgctgcatccgccgcgggcgaggcatacggttcggggccgatgttgccgccgccgaaaaaatatgaaggcgattacaatcgtgattattttgcgaaggtgttgcgtcgctgctggataaatgactgtttctcagtcgcagaggaagttacggcgatgatgacacaagacggaacctgtctcatatcacggtcgtcgcgaaaggaaaattacgggggtgtaatggaaaaatcagacaactattttcaaggaaagcggtacgtggcggcactgatagcggccatgacgcttctttcgggagcaggattcacggcgtccgtggcatccgcggacaccgacacggtgggctatgagactggtcgcattgcgttttcaggggctcggaccgtatgcggggagtactccatcgatttcgcggctctgacccgctcccggatgttcctgattgacgggggccggcgtggaactgaaggggcctgacaccgactatcagtgcccgggtggcatcatcggctttgacaattgctcgaatgccggttacagcagtgcggagatcatccggccggcggatgtcaagggaaagaagaagccggattcgtcgcgtccctatctatgtttcctggccgaacgcatgaatgtgcctcctgctgacgatgccgtgtaccatctgcaggaatgaccgggcgagggtctacgccggaccggtgtagaggtgaccgggctgtcgaagttgtgccacaccagggcaatttcggcggttttgagcgtggtgtggccacgtccgtatgtagggatgtttacacgtggcgagcaaaccgttggaaaatggcggtttgtggtttcagctgtctacccgcgctgtaccataccagagaatggtaaggttaacatcgcattgtgaggcacgcgaattgccacacaatgcctaaaagacgtgttttctcgctggtgtggtacagcctcgacgccgatcgtctcacattgcagacggtgaatctcgaagcatggatggcgcggccctgccggtgcatggcatgatgatgcgactcgtgtcagaccgcggattcacgtcgcttttttcggtcagccgccttttcccggcgtgccagctcctcgaccgtcatggcgatcacacgaaaatcgacgtcacagccgcggagggtaagctcacgcgcgacattgagcgcgaattcggcacatgcgacctcgtctctgatgtcatcggccgttatgacgatgatcgtccatcccaattgccgaagccggtctcgttttttgcgatccctgcgccattggtgcttgtcggtccgatgatgatcgccgtcgtattccaccgcgaccttgaaatgcttccatgcaatgtccaggctcattggcttgcccgaatcgaacatcgccctgtcgacatggcagttgacctccgcgtcgggcaggccgtgccggaggagtaccagtctcgccttgctctccttcggcgacagcacgttggccttgaccagttgcagtgcggtccggcaagcggtcttcccgagaaagtatggcgcattgtcgatgaactcgcgcaaggacgacaagaccagtcggggatatctgcccgatgatttcgatatggcggtgatgatggcctccgccagtatgacgagttcctccaaggacacgtgtgatgacagctgcgcccaggcatggaagggatgcaacgcgaatacattgcccttgatcggtacgcacgcatcaggatgagtggcgatcagcttccatacatgcggatgcgtgccgggaatgcggcgccgcctcctgtcgggagtgctggaggtgatgtgcagcatctccgcgtccagatcgcaggcctccggcaacggcacctgctgcagggcgagagcggtggtcatgccgaacagcacattgcctccgatgcgccacgccaatgcggcgcagcacatgatggcatcctgggcgcggtcgcgcagcgattgcgtcatgggcgttctctcgcccatcggctggagcatcacatcgttcatgaatgtcacggtagcgtattcgcgctgtcggtgtgatgaaccatggaaaaaatgtggatatgtggatgaatgcatggatatccacagctatccacatcgccgacgagcctgcgcgatttctcacgatgtgggtgatacggcgattctgggaggattacgacagcgtgcattggtacgatagggcgttatgagcgagaacatcatgcgaatcattgatctgcggggcaagaacctgtcccgcgccgagttacttgccgcgatgccgcgcgccgcgatgggcacttccgaagccaccgatctggtgcggcctattcttgacgacgtcaaggaacgcggcgccgcggccctgcgagacttcgaggagaagttcgatcatgtgcgtcccgagcacctgcgcgtgccggtcgaggcgatgaccgcggcacttgagacgcttgatcccgaagtacgcgccgccatcgaggagtccgtgcgtcgcgcacgcgccgtcgccgccaaccaggtgccgaaggacttttacaccgatctggccgaaggcgcccgcgtcgccgagcgttggattccgatccagcgcgtcggtctgtacgtgcccggcggcaaggctgtctacccgtcttccgtgatcatgaacgccgtgccggcgcaggccgctggcgtcgagtcgctggccatcgccactccgcccgcacgcgacaacgcggaaggactgcccaacaagaccatcctcgccacctgcgccatcctcggcgtcgacgaggtctacgcggtcggtggcgcccaggccatcgccatgttcgcatacggagccaagggctccgagccgcaggacggagacgtgctgtgcgacccggtcgacaagatcaccggcccgggcaacatcttcgtggccaccgccaagtcgctcgtctccgcgttcgtgggcatcgacgcggtcgccggccccaccgagatcggcatcatcgccgacaagaccgccgacccgagcctgctggccgccgacctgatcggtcaggccgagcatgacgagctcgccggctccgtgctgttcaccgattccaccgagatcgccgagaaggttcaggagtccctgaactaccgcgtgccgcgcaccgaacacgccgagcgcgtccacacgtcgctgtccggaagccagtcggccatcgtcctgaccgacagcctcgaccagtccatcgacgcggccaacgcatatgcggccgagcatctcgaaatccagactgccgacgcggacgccgtcgtgccacgcatcaagaacgcgggcgccatcttccgcggcccgtactccccggttccgctgggcgattacatgtccggctccaaccacgtgctgcccaccggcggcaccgcccgcttcgccgcgggactcggcgtgcacacgttcatgaagcccgtcgaggtcatcgaatacgacgaggagggcctgaaggccctcgctgcgcgcatcaacgccttcgccgtctccgaggacctgcccgcccacggcgagtgtgtcctgtcgcgcttcgtcaaggatccgtacgacaaggccacgctgcgcgaacaggagaaggaagccggtctgcgctaagggctgcttgggtggtttgcccccccagtctgccgcgtgcgaatgcgaatacaacccccgtcagcgggactatagacggaaagaacagagagcaatgagtgagaacaacagcaatgcaattccggcgagcctgccgctcagggacgatctgatcggcgaggagccgtacggcgcgccgcagctcgacgtgccggtgtgcctgaacgtcaacgagaacccgtatgcgccggatccggccgtgtgcgacaccatcgccaggcgcgtgcgtgagatcgcgcccacgcttaaccgctacccggatcgcgagcatatcgaactgcgccaggcgttctccgactacctcgcccgcgaatccggcacccgtctcgacgtggacgaactgtggggcgcgaacggctccaacgagattatgctccagctgttccaggccttcggcggcccgggccgcaccgccttgggcgccgacccgacctactccatgtaccccgaatacgcgcgcgatacgttcactggctggaagctcgcccaccgcaacgccgatttcacgctgaacgtcgacagggtaatcgaggccatcgccgaggtcaagccctcgatggtgctgctcaccagcccgaacaaccccaccggcacgccgctgccgatggccgacatcgaacgcatcctcgccgcctgcgagaccgccgatgtggcgggcgcgggcgaaggcgtccacccgatcctcgtcatcgacgaggcgtacgtggagttccgcaagcccggcacgccgagcgcggtctcgctcatcaagaaccacccgaacctcgccgtcagccgcacgatgagcaaggcgttcgcattcgccggcgcacgtgtcggctatctcgccgcgagcaagggcatcatcgactgcgtgcgcatcgtgcgtatgccctaccacctgtccgccgtgacccaggccgccgcgctcgcggcgttcgaacacaccgacgagcagctgagccgcgtcgagcacctgcgtgagatccgcgaatccaccgctgaatggctgtcacgtcagacctacaagggcgagccgctcgaagtggctgagtccggttcgaacttcctgctgttcggtgggcatttcgacgaccgcgaggccatcttcgacgagctgctcaggcgcggcgtgcttatccgcgtggtcggcccggacggctggctgcgcatgtgcatgggcaccgacaaggagatggaacaattccgtaacgcgctgaccgaagcattgcgtattgtagaaagcagataacaactcccgaaatgccggcggcgcgcgcgaccatcaacgtcatgacccgtcgtcggcgaccgccgaccggcacactggccggcaggcaagccgggacttatcgggacatatcaggatcaaggaccaaggagcacatcatggcgcgtaccgcgcacatcgtccgcgagaccagcgaatcgcacatcgaactcagcctgaaccttgacggcaccggcaagaccgacatcgacacctccgtgccgttctacaaccatatgatgaacgcgctcggcaagcattcgctcatcgacctgacgattcatgcgcacggcgacaccgacatcgacgtgcaccacaccgtcgaggatacggccatcgtgttcggcgaggcgttgaagcaggcgctcggcgacaagcgaggcatccgccgcttcgccgacgccaccgtgccgctcgacgaggcgctcgccaaggccgtcgtcgacatttcaggccgtccgtactgcgtgtgctccggcgaacccgacggcttcgaatactgcatgatcggcggccacttcacgggctccctggtacgccacgtcatggaatccatcgccttccacgccggcatctgcctgcacatgcaggtgctcgccggccgcgacccccaccacatcgccgaagccgaattcaaggcgctcgcgcgggcgctgcgcttcgcggtcgagccggatccgcgcatccagggcctgatccccagcacgaagggcgcactgtgatgagcggcaacgacgacaggcacggcggagacgacggtttcgacgacgacatccatttcagcgacgaggaacttgaggccgcgctggacggattcgagaaggaattccgcgattcgaacgcggctgccggcgaaccggcgaacgacgccgcggccgacagccccgcagacgatgcgggagccgcggattccggtcaggcacaggaggccgacaccgcggccgcgttcgacgacgagctgcaagggcttctgggcaacaaggcgaaggccgccgtgctgattacgcgcgtcgcgtccgcccgcctgctcgccgcgttctgccagctgtcggacgtgtccgccgactgcatcggatcggaggaaggggccgtggccatcctgcgcaaccttgacggcgacgggcccgaagtcgcggcacgcgacctcaccatcgtcgtgtcgggcatgtcgctggtgctcgccgtcaaccgtgcggacaagttggaggcgaccgtctatctgcaaggcaagccggggcagacgatcgccccgccgctgctgttcacatcgacggcgccgttcgtggaggatctgctgcttggcatcaccgacgaggacggcctgatcggcaccggcatgaaagtcgaacagtccgcggatctcgaccatgaccaggccatggccgtcatcgcggaacacacgaagttcgggcgcggctcgtcgcgcatcgaataatcgggcggccggcggacgccgcccgtgcccgtgcggccaaagattttcagactgaaggagacgacatgacatcggtggtggtattcgactatggattcggcaacgtgcgttccatggtgcgtgcgctcgccaatctcggccttgacacgacactgacctccgactaccggcaggcgcttgaggcggacggcatggtcgtgcccggcgtcggcgcgtttgccgcctgcatgaccggcctgcgcgaggtgtcgggcgaccgcgtcatcctcgaccgtctgcgtgccggccgccccgtgctgggcgtgtgcgtgggcgagcagatcatgttcgagcgcggcaacgagcacgcagacaccaccgaaggacttggactgatcggcggcaccgtcgatctgctggatgccgatgtcgtgccgcacatgggatgggacacggtcgaggcgccgtccggttccgcgctgctcgaaggcgtggagaacgaacggttctattttgtgcactcctacgcggcgatgagcgccaccgcgaaggatctgagcgccgagcaggtcgatctgggcggcgacgagcatatcacgtggtgcacgtatggccgtagcaggttcgtcgccgcctatgagcgcggcccgctgtcggtcacccagttccaccccgagaagtccgccgacgccggcaaacagctgctgcgcaactgggtcggcacgttctcgaagtagccggctgaacggcatgaccagccggcgcggccgggaaccccgactcacccggcaacgcggacggcgggccccgagcctcaacgacttcaacgattccaaaggagaacaaccatgtcactcacattgcttcccgcggtcgacgtgcgcgacggcaaggccgtgcgcctgcgccagggcgaatccggctcggagaccgactacggcagcccgctcgaagcggcccgcacgtgggtcgaggccggtgccgagtggattcatctcgtcgatctggatgcggcgttcggcacggggaacaaccgcgcgcagctgcgtgagattgtccatgagctcggcgacaaggtcaacatcgagatgtccggcggcgtgcgtgacgacgactcgctgtccgccgcgctggaggccggagcggcccgcgtgaacatcggcaccgccgcgttggagaaccccgaatggaccgcctcggtcatcaagcggtacggcgaccgcgtcgccatcggacttgacgtgcgcggccacacgctcgccgcccgcggatgggtcaaggagggcggcgacctgttcgagacgatgaagttcctcgactcggtcggatgctcccgctacgtcgtcaccgatgtggcgcgggacggcatgatgagcggcccgaacatcgacctgctgcgcgaggtcgcggaacgcaccgatgccaaggtcaccgcttccggtggcatcagcaagctggacgacctgcacgatatcaagatcctcgccgatttcggcgtggactcggccatcctcggcaagtcgctgtacgcccgcgcgttcacgctcgaagaggcgctcgaagtcgcccgctgaccgatacggctgtcgacgggggccgccccccccgccgcccgtcaccgtcggctgggcggccggcggcccctgctcacttcttcgcgccgcttttcttcgagcaggggagctcgcccttcttgatgagcttcctgaacagggagtaatcctcctcgttctgctccgcatacgcttgggcgaacgcggctatcgcctggtcgaactcgtcggtgcccccaagatagttggcgatggccacgctgtcgccggtgcgggcatgcgcgtgcgccaggcaccatgcgcacatgcggcccagatccgacaatcccagcgcgttcagatgatcgatgtcgatcgagcccttgccgttccagaattggcgcacgtaatagtcgcgcggccggccgtcctccgccacgaaactcgcccagccgagcagcacgtcggcggtggattggatcagcttctgcccctgcaccacacgctcgccatgcgtcgcatacggcgagcggccgacgaaccgttcgaagaccgactcgttggcctccttcatctgcagcatcagcgggtcgtcaagcccccgtccggtgagaatcgacacccaggcgcgggttccgaccgagccgacgcccacgaccttgcgggcggtgtcatggtaccggtaacggttcagcacgtaacgccggtcctcgtacaggctttgccggtagctgtcatacagcgcgtccagcctctcccgcagcaccccgagatccgcatagtcctgcagctcgctgatcggcaccagctccggcggcttcgagcggaaccgcagccgcttctcgccgctgtcaagataggtgagcttcgcagccgcatggtcggaatcacgcaccgacgcgcgcagcgcggcgtcgcgcaacgtgcggttgcgcttgccgttcaccgtgctttcgtaatggtcgagcgccgcctccacgtcgagatggtcgtaccagacgtcgaggaagtccatctgcgagaactggcggatatggtcgcggtacgagtgcacgcagcgtgcgaccgcgttgcgccggtccttctccttgatgccgttcgcccgcccgcagatctccacggacaccgcgagccgcttcacgtcccattcccacggtcccgtggctgtctcgtcgaagtcgttgatgtcgaacacgagccggtcgctgggggagcggaacatgccgaaattgccgatatgcgcgtcgccgaccgcctggacggggatgccggtggtcggcgtgtgcgcgaggtcgttcgccatgatgagcgcggtgccgcggtagaacgtgaacgcggaatcgctcatgcggtagtacctcagcgggatcagatccggcacccgctgcgccgactgttcctccaaaagcccgatcacgtcgcgccggcgcgacacgatcttccagtcggcgtggctctccaacggtgtggtcttgcgcagcgcgatgccggccttggcctgccccagcggcgtgtcggccatgtgccatgacatatcgatgatgggatggttctcgctcatggctccacgataacgccgacgcgggagcgacattccggcgatgccccggcgtgtccgatggcatgttaacgagtctcgtaacacggacgtgaaaccatgaggaattatggataagcagcaagagtttgccctgcgcacggtcgaggaacgcgacgtgcgctttattcggttgtggttcactgacgtgctgggcacgttgaaatccgtggccatcgcgcccgccgagttggaggcggcgttcgaggaggggcttggcttcgacggttccgccatcgagggaatgacgcgcgtgtcggaggacgacatgatcgtgcagcccgacccgtccacgttccagatactgccgtggcgtggcggcccgcagggtaccgctcgcatgttctgcgacattctcacgcccgacggcgagccgtccctgggtgacccgcgccacgtgctcaagcgtgcgctcgccaaggcgaaggagaagggtttcacgttctacgtgcacccggagattgagttctatctgttcgagaaccagaccgactggtcgaaggcgccgactccaatcgacgagggcggctatttcgaccatgtgccgcgcagcccgggcatggacttccgccgcgccaccgtcaacatgctggagcagatgggcatctccgtcgaatactcgcaccatgaggcgggtcccggccagaacgagatcgacctgcggtatgccgacgcgctgaccacggccgacaacatcatgacgttccgcacggtcgtcaaggaaatctcgctggagcgcggcatccacgccagcttcatgcccaagccgctcgccgacgcgcccggttccggcatgcacacgcacctgagcctgttcgagggtgattccaacgcgttctacgaggccggccaggagttcaacatgtccctgaccgcccgacagttcgccgcgggcatcctgcatcatgcggcggagatctgcgcggtcaccgaccagttcgtgaactcgtacaagcgactgtggggtggtgctgaggcgccgagctacatctgctggggtcacaacaaccggtccgcgttgctgcgcatcccgcagtacaagcccggcaagggcaactccgcgcgtatggagttccgtggactcgacccggtggcgaacccgtatctggcgtattcggtgctgctcgccgccggtctggacggcatcgaacagcagatgacgctgggcgagccgaccagcgacgacgtgtgggagctgaccgacgccgaacgtcaggcgatgggcatcgagccgctgccggattcgctggacgccgcactgaagatcatggagaagtccgatttcgtcgcggacgtgctcggcgagcatgcgttcgagtatttcctgcgcaacaagcatcaggaatgggacgaataccgtggccaggtcacgccgtacgagttgaagaagtacctgcccaagctctgacgtgacgtgaaaccggccgactaccggcaaacaagaaacggtgtggggatgatggctgctgatccggccatcatccccacaccgtttttgcttgccgaaccgaccgccgcaggatgccgctgcggtcactcgaccttgcgcggcgtcatcttcttggtggccatgtcgttgctcccgtaggtgctggacaggcgaaccttgaccggctggcccgggtcttcgaccacataggagaccgtcgccttggccaggacccccggctggacggagcggctgaaactcatgttctcgtacccttgtgggagcggcggctcggtgtagtagttcatttccagctgggagccgtcctgcgtgacggtgagcttcgcggcgttggacaatggctcattggcctcggattggttcacccatgtgatggtgacgatgatggtgtgacggccctgatagtcgtcggggcccgtcgtcacgtcgtcgatggagacgagggcgtccccgctgtagctgctgatccgcttcatcttgcgcttctccgcctcggcggctttcggggcgggagcgatgtcgtcaggctggacctgctcgtattgcgtgccgctggtcggtgccttgaacgcggacacgatgccctcatggtagcgggtcgcctgattggctacgacgtacaggtcgcccgtcgcgtcgttcagctggtacgcgatggtcgcgtcgctttcctcgccctttgcgatcttgatgtcgtccgactgcgtcttgtacccttcgatggatgagccgccgcggctgtgcaggtaggttttgttcaggccgatgccgctctgatatacctgcaggtccatggcgagttccccgaaggtcgtattggcatcgccggtgttcttccaatggtaggtgatgatcaccgtcttgtgcccgtcgtgatccgtggggccggtggtcgccttggctatggtgaccgtggccttccggttgccgaacgatgtcgtctcgccggttttcacgcgggtcggcttgttgtcttgggagggcgacttgaatgagtacgatgagtcgtctgagtcgctgctgccgcctgtgctgatgatatgactcaccaggtttgatcccagcgcgaacacgattatggcgatgacggcaacccaggatcggcgctggcgcttcgtggctccgccgggtttgcggtcgctcttggactgcacgtgtccgtagccgccgcgatatggatggccgttgtaggacggattgaggggagcgtcgcccgctccggtccgtgccggcccgcctggttcgtctgcggggctcggggcggccggcttgcctgccggtcggcgacgatcggcatcggggctgattcggccgcttctgggctgctgatacgccggctcgtcgacctgcgaggtctgggaatcgatgctgatgtacgccggcgaatcgtccacatcgaacggcgatacataatcgtcgtcatgatgcctgctgaacaatcccatgcctgttcccttgtctctcggccgcgcacggtgatgcatgtcttctcccattgtaggcggcgtgccggtgcagcgcgagcgccggaaggtgaagaccgtcgaaatcgccggtgaatgatgggccgtgcgtcttcggcgcgtctcctgcgtgtctcgggggccttgcgcggcaggaggtgccgctaatgtatgttccgtctggaagaagagaaaaacagcaggggtacggtcatgtccggttccgccatccgtgggcggcaggggagcgaacgtttcttcacgctgccggccgtcacgctgatcgcgtccagtttcgtgctgggcatgagcgatttcgtggtcgtgggcatcctgcccgacatcgcccacgggttgcgggtcttagaggtcacggtcggcaatctggtgtcgcggttcgccacccatctgacgttgaccggcgtgttcctcgccggcaacatcctgtgcgcgctcgcgccgaattacgcggtgctgccgcattacagccacatggcgaaggtcggttttctgccgcagttccgcatgcgggccggcaatggctgtctcagtgccttgcgtctccgaaccatccccggtagatgatcgagaagttcctgttgccgtagctggagcaggagtctccttccccggctccagcggcgagcgcggcctcgttcggctggtagggcgtgtagatgtacagcagtgcggtcgccttgttgccgatgaccacgttggcgccgccgcagctcgtgttcagatggaacctgacgaagttgagcttgccgacatggtaaccgtatgatgcctcatgccgcacgtaatacctgtatcgatgcgccgcgccgtagacctgccggaagaagcctgcgtactgcgggtcgcagtcgttgtcgtcggggcagctcaggcccatggccgccttgaactggaagtcggtcggcttgctcgcggtgacgagctgctgttccttctgcagtacggtgagcagcactttctggctgatgccgcatgatcgcgacgatttgtcgatgatcgtcgccgcagtctctcccttggcgccgtcgtatccgtcgcagtaccggtcatcgggctggtccgtggtgtcgaacgtgcggtttttcaggcatcccgtcccggtgcagtcgccgccgtgctcatcgaggaacgattgcacttcggtgcggctcatcgcatagccgttgaagaactggccgtcggagatgatgttgcccgggtcgaaaccgtatcggtcgcccagatcctgctgtcgttcctcggccgtcacgagcgcgatgcgctgtccgacgaacgaggtggtgccccacgccagcgccacggcgcacaccgccgccagcgcggtgcccgccaccgcgaggatgcgcctgcgccatccagcccgcttccaccagcggcgcagcgtgttgcgtcgggtcttcggcttcgggcggcggatcgcggaccgtgccgctgtgccgtgcctggtgtttttggtgttgtttcccctgatgtttttcttggcggccgtaccgggccggcggttgcgttgcttgccgccgttccgtcctccggtccgcccggtgttgttcccctgcttcttacatgttgtcatcgtccgtcattgtagcgcggggatatgttggatgcgcggactggccgtgcgcggcgacgggggagaggccgcgcacagcgctatttgccgagcgttttcttgattcgctgcaagctgaccggcttcgcggtgccaagctcctgggcccacagagagacgtagaactcctccagcatccagcgcgcgtcgtcggcctgtttcgtcagtgcctcatggcgtgggcccgcgggctccgtcttggcacgctgaacggccttgtcgaccagctgtcgcgcctcgtcggcctcccaggcccatcgcacgtcgcggttcttgtcgttcttcgccttggtgagacggatcaggtcggcctccagatactttggtatgcgcggcagggcggcgggcggcgtcgcgccgatgaacccggggaacaccagcgtggcgatatgctcgcgcaccgattgcagcaccgacagcatcggcaggtcggccttgccggaggtcgccttgtcgacattcgcgtacgcgcgcaggatggcgatgacatcatgggcgagtgcgtagacggtgtcctcgtagacctcggtcacccccatcaccgcatcggcgagcgcatcgtcgtcggggagcgtgtcgatgttcggcagcagacgtttgacggtggccagctgcaggtcctccaccagcgccttggtggaggggtatggcgccgacgcgagcatcagcgcctcggtgccgagccaccgagacgagatacgctccgaaggcatgcgcagcgcgtccagggcgccccgccacagcatcaccgcgcgcgactcgctcgtcgccccggccttgtgcagcaggttggcctgttcgaccagtttgccctggctggcggcctgttccgccttgtgttcgaccatgcgccgagcggatgcctccgcctgttcggcgaactgccgttgcaacgcggtcagggatttgcccgaacccagtaccttcaccgggccgcgtgcatgccgccgtccgcgtgcgttgcgcggcgcggggagttgctgctcgatggagaacgtcatccgcagataggcgggcagcttctcccatagttcgccggtcagcacctccgggtggatctgagcgcccacggtgtcgatcgccgcctgggtgaacacgtgcggcaggtcgggccatgcgtggccctggccgtcggacgtgccggtgccgggcagggccggataccggtcgtctatccatgcgcggatcttgcgcgcggtgtccggtgcgggcacgaactgcacgcgcagtgatttcggcagggacttgatcagccccacgatcagctcgtcgagcagtccgggaacgttccatgtgaactgttccggtgtcagacgggacagcgccttgagcggcacgtgcacggtcacgccgtcggcggggtcgtgcgggtcgtagatgtagctgagccgcaggtcgatcggctggccgtccgtgccgagcgcatgccaatggtccggatagtcggcgaggctcaccgactccgccgatgacaggcgttcgaccttgtccgggtcgaaatcgagcagatgcgggtgttcgccgtgctcgcgcttccaccatttcgccaggtcggcgacgcaggtcacgtcattggggatgaccgactggtagaagtcgtagaggtcctcgtcgctgacggactgcgagacctgcctggtgcgactggcgtcctcggccgcctcgtccaggatgtcgcggtttcgggccagaaaatcgtcatagctgaaccgctgctggacgtccccctcgacaaggccctgccggatcaggaagtcgcgggcctccatggggttgatgcgcccccattgcacggtgcggtccgagatgatcggcagaccgtacagcagcaccttcgccgtggcgacggcggagccgcgcgaaccagaccagtgcggctccgcatacgtggtgcgggtcagctgcccggccagcggctcggcccacgccgggtcgatggcggcgctgtacctcgcccacaggcggctcgtctccaccagttccgtgctcatcacccactgcggggtggatttggccacggccgaggccgggaacaatgcgaaatgagtgcctcgcgcgccctgatagtcgttcttcgccatcttctgagcccgcttgatggccttggccttcgccgcgcccttgagaccggcgaaatcggaggccttcggctcgcgcacgatctgcatgcccatcatcgacagcaggccggagagcatcgacgtgtgaatgccgcggtcgtcccacgagcagcacagcgaatgggccgcctgctggttgatcggcagctggcgtaccgccagatcggggcgggagaccggctgcggggagccgaccttgaacttgagttcgcggcacatctccgtcagctgattgaccaggtccttccactggcgtacgcgcagccagctgaaatactcgctcttgcagatacggcgcagcgcattgttgctcggctcgccatcggcctggaagatacggtcccagatgttcagcgcggtcagatagtcgctggacggatccgcataccggttgtggatgcggtcggcctcatcccgggcctcgtccgggcgttcacgcggatcctgaaggctcaggaacgccacgatcaccagcacggcagccaacgtgtcgggcgtgctggatttcgcggcctcgatcaccatgcggccgagacggacatcgatggggatgcgggcgagctgccgtccgacatgcgtcagcgtcacctcgccgcgcttgcggccgatcgccttgagctccgtcaactcgttgaagccgtcggagaccgccttcatgtccggcgggtcgatgaacccgaaattcgtcacatcctcggccgtacgggcgacgcccaccgacagcatgtgcagcaccacggcacccagcgatgtgcgcaggatctccggctcggtgaaccgagggcgggtctcgtagtcctcacgcgaatacaggcggatggcgatgccgtccgcgatacggccgcaccggccggaccgctggtcggcgctcgcctggctgatcggctcgatgggcagccgctgcaccttggcggtctttgaataccggctgatgcgggctgtgcccgggtcgaccacgtagcggatgcccggcacggtcagtgacgtttcggccacgttcgtggcgatgacgatgcgctgatgcgtgtgcggctcgaagacgcggtgctgctccttggacgacaggcgggcgaacagcggcatgatctcgatggcgtcggggtggcgcatgtcgtcggcgcgcgggccgtaatggcggcgcagcgcgttctcgaactcgtggatgtcgcgctcgccggaggcgaacacgaggatgtcgcgggcgccgcgctcatggctggaatggatgatgagctccgcgcacgccctggcgaccgccgtgggcatgtccatgtcgggttcgcgagatgagccacggtcccggccgccgtcggagggtgccgccgacagttcggcatacgattcctcgccgggcatcgcgccggtctcgaatccgggcacgtgccgcatcagcgcgggcgcagtgcccagcggctcgtagacgacctgcacggggtaggtgcggccggagacctcgatgaccggaaccttctcgtgcagcgcatgctcgaaatgctcctgaaacttcaccgaatcgatggtcgccgaggtgatgatcagcttcaggtcgcgacgtttcggcagcagcgcggtgaggtatccgagcaggaagtcgatgttcaggctgcgctcatgcgcctcgtcgatgacgatcgtgtcgtattgccgcagctgggggtcgcgctggatctgcgccagcaggatgccgtcggtgacgacgcgcagccgggtcttcggcgacgtctcgtcggtgaaccgcacctgatagccgatctcgtcgcccagatggacgcccatttcggaggcgatgcgttcggcgacggttcgcgcggcgagcctgcgcggctgcgtgtgcacaatctgccggccgtgcgtaccgcggccgagctccagcaggatcttcggcagctgcgtggtcttgcccgaaccggtctggcccgagacgatgacgacctggcttgatgacaccgccttggcgatgtcatcgcgagccgccgagaccggcagctcggaaggatatgtgaatttcatccgtttacttgttcctcaacacttcaatgacgcgatatcccttcgcggaatgatacttcgacacctcataatcgtcgcccagcgcggtggcgagccaggggatcagcgagtcggcgcccaagtttttctgcaccaccaggtacgcggcgcctgcggggttgagccgcggcagccacgtcatcagcaggtcgtgcagcgcgtccttgccgatgcggatcggcgggttcgaccagatcgcgtcgaacgccagatcggccggcacctgctccggcgacgcggcatggatgtgctcgcagccgttggacttggcgttggcgcgggtcaggtcgagcgcgcgttcgttcacgtccacggcccagacgtcggccttgggcgaggcgaacgccagcgcaagcgacacgggtccccatccgcagcccagatccagcagcgtccccgtctccggcggctccggcacctcgcgcagcagcaccgacgtgcccagatccaggcgcgagccggagaacacgccgttcgacacctcgaccacggcgtcctgcccgcgcagcgtcaccttcatgcgacggcgaacgtcctcggaggacggttcggcggcgaaatactgttcggtggcgttcccgtcccgcttcgaggcgtccgaggcatgctgcgttttcattcgttctcccgcatatagatgagtgatggctttcgacttggaaccatgatagtcaaaggcatggttagcgggggaggactgcggattcctatgccttcgagagcgctgcgcctcttcgagaatgctttctggcgcaattatccggtagatatctaccgcagtgacattgcgtggtgcacaatgcaattgtcgggcggatggattccgccatcaatggcgaaaggatgggatcatgagtggtgcggataaactgggatacctgattcgtgcgctttcgaggacgaagcgcaaggattacgagaattacgtcgtcaatgccatatggaaccggttggcgatgggcgatgtcaagccggtcacgcaacagctggtgttgtggcctgacgggcgtcggtcgttcgtggacctgtattttcctcaggtgatgatcggggtggaatgcgatgaggcctatcatcagggcaacgggaacgtgaccgcgagcgcgagataaccatcccggacgtgctgcgtcagattcgcggcgaggactatcgggcgttgcatgtggatgtttccggatcgtatgagcaggtggagtgatccatcgacgactgcgtgcggcggatacgtgcagagatcgaacggcgcaggcaggcgaacgagttcacgccgtggacggaagcctacgtcgattacaaggagttctacaagacgagggacgccgtcagcgttgcggatgacgtcggctttccccgaatcgccgacgcggtcaacacgctgtgcggttccgagtacaagagatttcaggaatcctggttcgtccccagcgtgatgcgccaatggtacggcgaccgatatcgagtctggttcccgaagctcgccataggcgggaaggccgtggcaaacggttggaacaaccggctgtccgatgacggcacctatatctacgaatacaacgaggacgccgatctggtggatccggtcggcgacgacggcgaccccaatgacatccgtataacgttcgccaagtccgccgacccggtgacgcgggttcaggcgtatcgattcgttggcgtgttccgccggatctcgaacagcgaggacggaacacgaaagcggtaccagcgcatcgaaaccgtcttcccgattcatcgcacaccttgtctgccaatccacagataatggcaagcgtttggagaacgtcgttccgtactcaccatcgtgcatgcgatgcggatcacctgcgatgcggaccacctgcgatgcggaccaccgtggtgtggttcatgcctgcaggggcgtttcgtgtcggatgccgagtgacagatgtcgagtgacggataccgagtggcggatgacgagcagagagcatgagtgacagcagaggtgccattgagccaacagaataccgttgatgcgaatcaggccggtcagccgggcgaacaggaagagccggtgctgaccggtgtgctggccgaccagtcggacgtcctgctggacgagaacggcgatgggcacgtcgggcaacgggacgccgaggagtgggaggagcgcgaatcccgcaaccagctcaagcatgtcgcgggtctcggggagctgcaggacgtcaccgaagtcgaataccgcaaggtccgccttgagcgtgtggtgctggtgggcgtgtggtccagcatgaccaccaccgcggctcaggccgaggagtcgcttcgcgagctcgccgcactggccgagaccgccggagcggtggtgtgcgatggtctgctgcagcatcggtacaagcccgactccgccacatacgtgggttcgggcaaggcccgcgagctggccgacatcgtcgccgtgaacgaggctgacaccatcgtcgtcgacgatgatctgccgcccagccagcggcgtgcgctggaggatgccaccaaggtcaaggtggtggatcgcaccgcggtgatactcgacatctttgcccagcacgccaccagccgtgaaggcaaggcacaggtggagctcgcgcagcttgaatacatgctgccgcgtctgcgcggttggggcgggtcgctgtcgcgtcaggcgggcggccgtgcggccggggccgacgcgggcatcggatcgcgaggcccgggcgagacgaagatcgagatggaccgtcgcgtcatccggagccggatagccagattgcggcgccagatcgcgcagatggccccggcccgtgaggtcaagcgcggttcgcgtcgacggtacgggctgccgaccatcgccgttgtcggatatacgaacgccggcaaatcctcgctgacgaatcgtctcaccggttccgcggagctggtcgagaacgccctgttcgccacgctcgacactgcggtgcgtcgagcccgggccaaggacgggcgactgtatgcctacgtcgacaccgtcggcttcgtgcgaaacctgccgacccagctgatcgaggcgttcaaatccacgttggaggaggtcgccgaagccgacatcatcctacatgtggtcgacggttcgcaccccgacccgttctcgcagattgacgccgtcaacgacgtgctcgccgacatcgaaggggccgaggagataccgcgcgtcgtcgtgttcaacaagatcgaccgaatcgatgcggccacacgcgagcggctggcggcgctcgaaccggaggcgagtctggtgtccgccgccacgggagagggccttgacgacctgctgcggcgcatcgaatcgctgctgcccgttccgggcgtgcacgtgtctgcgctgctgccctacgacgccggttcgctgctgtcgcacgtgcgcgaatacggcaacgtcgattccgtcgactatcgcgccgatggcatatggatcgaggcggatgtggaccgccgactcgccgcccagatcgtcgatagggcgatcgatgagacggacggtgatggcagcgatcacatcgatgccgagcatgatgtcgattgagtgttctacccattgccgctgacgcaatgtctgtgagcgttcacaacaatgtgacgcaaatcaccttgccttcggggcgataatgactacggcaatcagcgcaaacgtcatcatgtgtagatacagtaagtgtgttgtcaaaatgaaccccgccaaacacggggcactgtgctaagagaggtctagcaaacatggtggattcacccattaagcccacaaagctcgccatcgtcggtgccggcgcagtcggttccacgctcgccttcgccgccgcccagcgcggtgtcgcccgtcagatcgtcctcgaagacatcgccaaggagcacgtcgaagccgaagtcctcgacatgcagcacggctccagcttctaccccactgtctccatcgacggttccgatgaccctgagatctgccgtgacgccgacatggtcgtcatcaccgcaggtgcccgtcagaagcccggccagtcccgcctcgacctcgccggcgcgaccatcaacatcatgaagtccatcatcccgaacatgatgaaggtcgccccgaacgccatctacatgctcatcaccaacccggtggacgtcgtcacgcacgtgtgccagaagctgtccggcctgccgaccaaccagatcttcggttccggcaccaacctggactccgctcgtctgcgcttcctgatcgcccagcagaccggcgtcaacgtcaagaacgtgcacgcctacatcgccggcgagcacggtgactccgaagtcccgctgtgggcctccgccaccatcggcggcgtccccatgtgcgactggaccccgctgcccggtcacgagccgctcgatgccgccaagcgcgaggagatccaccaggaagtcaagaacgccgcctacaagatcatcaacggcaagggcgccaccaactacgccatcgccatgtccggcgtcgacatcatcgaggccatcctgcgcgactccaaccgcatcctgcccgtcagctccatgctgaaggacttccacggcatttccgacgtgtgcatgtccgtgccgacgctgctcaaccgtaagggcgtcaacaccgccatcaacacccctgtctccgaccgcgagcttgccgccctgaagcgctccgctgagacgctgaaggaaaccgctgcccagttcggcttctgatatcggattgattgacggggcgccggtgcagatcggcgcatgaaccgccctcagtcttgcttcgcgccttgccatgctggcgcggctgtcggtcaggagccggcggtgctctcatcttgcccccccccggcgggaaggccatcgagtgaagcgagactgggggtggttttgtttatcggcaggggtcctcctcgtcctggtattcgcccgcatctgctcacagagaacgtcggcgcgccgttcgattcggtgtatagtgaaccctgttgtttgaaaacctcggcttcggccgaggttttcgtcgttctagggctattgaaaatgattgtaggaaacagtttcacatagcaggcagaaggagaggtacactatgccgcacacgcatggaacggtgaacgaggtgacgcgcggcagcaaggcgcaccagcgacggcttatgatgacgctgaccttgaccggcacggtgttcgtggcggagatcgtcggcgccatcatcaccggatcactggcattgctggtggatgccgggcatatgctcacggacatgtcggtgttgattgcatcgacggtgacggcggtgcttatgcgtcgaaagcccaacagctcccgcacctggggttgggcccggcttgaggtgctgaccgcggaggcgggagcgatgatcctgctgttcgtcggattgtatgcgctgatcgaggcggggatgcgactgttcggaggatccgccgaacatgtggcggacagtgggctgctgctgttcttcggcattctgggtctggctgccaatgtcggctcgatcatcatcctcgccgggcagcataacgacaacatgaacatgaaagccgcgttcctcgaagtggtgaatgatgccctgggctcggtggcggtcatagcgtcggccgtggtcatgatgctcaccgggtgggatggcttcgatgccatcgccggcggcctgatcgcgctgctgatgattccacgtgcggtgaagctgttgcgcgatgcgctgaaagtgctgctggaggagaccccggacggattgaatctcgacgaagtacgtacgcatctggagaatatccctcacgtcgtggccgtccatgatctgcatgcgagcaccgtgtccaccggcatgcccatgctcatggcgcatgtcgtggtggaacccggcatgagcatggatcaggcggcgaatgtgctcagccaactgcaggactgtctgcgcgaacatttccccgtctcgattccccacaccacgttccagctcgaaccgcaggggtaccgttcgcccagcgccgaacagctgcactcctgaatgggacgccgcattgcgcggcttgatacgacaatgggttgggtgattgcctgaaatcgggcgattacccaacccattgtcgtatcaagccgcgcgagtgtattgaattgcaaggtccgggacggttggctgcggtcagagtcgacgcagcacgctgacgaccttgcccatgatctgcgcgtgggtgccgtcgatgggggagtatgcggggttatgcggtatcagccagatgtggccattgtccttgcggaacgtcttgatcgtggcctcgtcgtcgagcaacgcggcgacgatgtcgccgttgactgcggacggctgttcgcgtatgaccacgtagtcgccgtcgcagatagcggcgtcgatcatcgagtcgccgtgcacttcgagcatgaacagtttgccgctgcccgtaagccgttgcggtagccgcatgacatcatcgatgtgctgttcggcggtaatcgggacgccggcggcgatgcgcccgaccagcgggacgtcacgggatgcgagaatcgactcgctggcctccgtgtccccggggaaggggagtaccgtggcggtttgcgagtccgtgccggaatcatacaactcgatggcgcggcccttgttggcgctgatatgaagatagcccttgcgctccagtgcatgaagctgatgcttgaccgatgacgggctcttcagcccgacagcttcgccgatttctcggaaggacggagcgaatccctgttccgcaatgtgcttgcgtatggcatcaagcaccagatgctgcctttcggtcagggcgtcatcgcgttgccgcgtggcgtttttcgaggtgggtgctggtgtgctcacgtcgactcctttcatcttcgttcaatcatagcgtgatttgttccatgaaaacaaacattcgttcgatatggcgtgttgcttttgtcgaaccgctgtgtcactatgagtacagttgttctatgaaacatgagttcgagaaggagggcgacatgatggaacaaatgattgaggcagcggggctccagtgtgcatcgagtcgtcatgatgcgatgcgcgatgtggcgttcgatgtcagaaacagcgatgttccaacgttttcgaggaatatggattcttccgatgcgcaacggcgtgattcccgggtgattatcggagtgtgcgacgagcatggtgttcgcatggcgaagaagggtcattcgaccatgtgtttgactcttcgcggcaagatcgtgttctcgatgatgggcgccctgctgtgcctgtgcatgatcggtctgctgatgccgcaggtcgcccggtcggcgccggatccctccgcagtgtacagctataccgtgcagccgggggacaccttgtggtcatatgcctcggccatcactcctgatgggggcgatgtgcgcgacaccatcgatgatctgatatcgctcaaccatctcgatggtgtctcgttgcaggtggggcagcagctcaaggtgccgattgtctgattccggcgaattcggagcggtgcgtccccatgagtgctttttcggatcgcttcttcggaatttaccgccggccgcttccggattcggatgtgaccgttgacatggggaaggggctttgtcaacgcttacgatattctgaggtcatgcattgtccttattgtcagaattccgataccaaggtcatcgatacgagaatcagtgatgacgggttctcgattcgtcgcaggcgtgtgtgtcagatatgccacaaacgcttcaccaccgtggaaagcaccatgttgttggtgcgcaagcgttccggaaacgtagagccgttcgaccgcaagaaggtggtgtccggcgtgaggaaggcctgtcagggacggcccatcaacgaagacgatctacgcacactcggtcagcgcgtcgaagaggatctgagggcgagggggcttgccgaagtcgattcggacgatgtcggcaaggcgatattggctcctctacgggagctcgatgaggtcgcctacctgcgattcgccagcgtgtatcagaatttcgatggtcttgaggacttccagcgagccatagacgatctgcgcaaggaaaagcacgccgaggcggaacagcactgaaacggaacagcactgaaacggaacggtgctgaaacggaacggtgctgaagtgaagcagtgccggagcgaagcagtgctgaagcggaactgcgctggtcgaaactgcactgacacgaatcaatgttgatgtcgatgccgacgtcgacatgtgacgcttgatatgcgaccggccccttccgtgatcgaacagcggaaggggccgtgtggaaaaccgatgaccggcttgttcagctgatcacgcgcatgcgaatcgtgccctcgatgtggctgagcgcgtccagcgtggtctggctgggcttctgcgatacgtcagtgaccacgtagccgagttcgccctcggttccgagagactgcgcagcgatgttgatgttctcctcgcccagcacatggttgacgcgggcgagaacgcccggcaggttggcatgcagatgcgcgattcgagcagcgctcttgcacggccccaacgtcacctggggaaggttgaccgaaagcatggtcgaccccttgtcccagtagtcctcaagtcgctgcgagacgaaatgaccgattgacttctgcgcctcaagcgtcgagccgccgatatgcggggtgagaatcatgttgtcctcgtcggcgagatcggtgtcgaacggatcgccgctcttcttcggctcgacggggaacacgtcgaccgcggcgccggaaagatgaccggaatccagatgacgcttcaacgcgtccaggtcggcgacgaagccgcgggacaggttgatgaaaatggcattcggcttcatgcgggcgaactggtcctcgccgaagaagccagtgttggacttgcggccgtccacatgcagggtcaccgcatcggactgctccagcaattcgtcaagggtctcgcaacggtgggcgttgcccatcgccagcttctcctcgatatcgtagaacacgacgcgcatgcccagagcctccgccagcacggacaactgcgagccgatattgccgtatccgatgatgcccaaggtcttgccgcgaacctcatgcgagccggaagcggacttgtcccacaagccatggcgcatgtgatgcgtgtgggcgggaatgcggcgcatcaggcagatgatgtcgcagatcaccagttccaccacggaacgggtgttggaatacggggcgttgaacacgccgatgccatgcttgcccgcataatcgagatccacctgattggtgccgatgcagaagcatccgaccgcggtcagggacgggcaagcgtcgatgaccgctgcggtcacgggcgtcttggaccgtatgccgagcaggctcacgccgtcaagcgcctcgatgagttccttctcgcccagggcgcccttgcgcgtctccacttcgaaaccgtgatcgcgcagcgattgcgccgcatccgggtgaatgttttccaataacagagcttttgccatggtacctaccttatagctgcaaagccgtttcgtcttcccttgtccgcactataaccaatcgctgcgttggtctggtcatagccacgtagagatccgaagccgccaccaggcgcgagggagcatcctgctcgatacgtccaggctgtacgaccactacggcgtcgaattcaagtcccttgaccgactccgtggaaccgacgctgatctgcgcgtcccactcgtgctgctcggacagccggttcgtctcttgctgtcccagcgtacccggaagcgttgaaaagatagtggatcggagcgggtcgagcatgtgggcgggggcgatgaccgccacgcgaccggttccgtccgcatccacgaactgcttggctagctgcgcgacatgcgatgccgcggtcgcgatcgtgtcggattcgccgtcgacgatgatcctgcgcacggcgtccggtatcgtgcgcacggcgttgaccgtcgagatatacagtcccgccttctgcgcgaagtccgaggccaggtccgaaacctcctgcggattgcggtagttgatggtcagctcgttgagatcccaccgccgctcgccgaacagccggttcatcgtgcggtcccagcggcgcgtgccgccgagcgcagacgtctgagccacgtcgccgacgatggtgaacgagcgcgacgggcaccggcggatcagcatgcgccagtccatcgcggtcagttcctgagcctcgtcgacgaccacatgcccgtatgtccactcgcggtcggccgcggcacgctgtgcgatgaactcgccgccctcgccgttcatctggtcgaccagcatctgcgaggagacgatgcccgacccgagacctaccgagttcagggtgtcctgcgcgaactgctcctcctgggcgcgcttcgcgttcttggcggcgatctgcgccgcgatcttggggtcgggccccagaagctccatggcctcgtccagcagcggcacgtccgattgcgtcatcggggcgcccttggggcgggtgagcgcggcgatgccgtcgtcgtcaagccacggcgcgagtgcgcgaagacggagcggatgggaccacaggttgtcgatcagccacgtgccgttcatcggcagccacgcgaggttcagcgcgaccctcaccttgtcgttcaggcgaaggttcgtcagcgcctcgttcagctcgtcgtcggacggcgtatagtccagctgctcggcgtaacggtcccgaagcgccatcagcatggtccgcacgaaggtctcccgcgccttgttgtgcggctggcgcgtgcgcttcgcctggtcgatggccgccctgacatcggtgtcgagcatgcggaccgcgaagccgttcacgtgcacggtgggcaggtcctgcggaacccgttcgcgcagcgcgatggcgttggccacgacctgcgccattcgacggtctcccttgagcttggcggcgagcggcgtgtccgtcgcggtcgccttgatgcctgggatgaggtcggcgatggtgcggctgacgacgcccgtctcgccgagtgagggcagcacctggtcgatgtagcgcaggaacgtcgtgctcgggccgatgaccagcacgccggagcgctccagcttgcgccggtgcgtgtacagcaggtatgcggcgcggtgcagcgcgaccgcggtcttgccggtgccgggcccgccctgcaccaccagagccctgttgagatctgagcggatgatgcggtcctgctccgcctggatcgtggcgacgatgtccgtcatcttgccggttcggcgcgaactgagcgatgccagcagggcgccttcgccggtgagcgtcccggccttcgaggccttgtccacctgctcggaatggacgtcgagcacctcgtcctcgatgccgatgacatcgcggaagttcagtgtgatatggcggcgcatgacgatgtcgccgtggttggatggcgtcgcctcgtagaacgggcgggccgcctcggcgcgccagtcggtcagtatcggctcgtggttctcgctggacaggccgatgcggcctatgtaccggcgctcgcctttcacgtcatcgagtcggccgaacaccagacggtcttccatggcgcgcagctgggtgagccggtcctcgtacatggtggcgaacgagtcgcgttccgtgcgctgggtgggggacccgtgcgagccggccgcacgtaccgtatccaaccgcgtgcgcgtctgcgatcgcagggcgtccaagcgggcgtatgcgcggtcgaccgcttgctgttcctcgtgcagttgcgttgataatcccggcattgatgtccgttctctcggtgaaaactcaggcattcaaatgtagcgcaagggcaatacgaagccgtgtggatgtgtcctgccgcaacggcgctccgaagcggttgtggaggatacgcattaaaactatgtgggaaaaaccatttcgtggggatttgtggtgagaagtggggtacagtggtggattggtgtatccggattcacggttaggaggtggaacgttggcagacgactcgcaagtccagaacgccacgaacccctccgcacagccggagccgatggccctgcccccgctgttgctgggcacgtacaccccgaaaatcgacgcgaagggccgcatggccctgcccgccaagctccgttcccagcttggcgcgggactcgtcatggcgcgcggccaggaacggtgcgtctacctcctgccgcaatcagagttccgtcgcatcgccatccagatccagcacacgtcgatgggcgacaaggccgcacgcgactacctgcgcgtgttcctgtccggagccgtcgaccaagacccggacaagcagggacgagtgctggtaccgcagatgctgcgcgactacgcgaacctcggcgacgacatcgtggtgataggcgtgggcacccgcgccgagatctggaaccgcgaggcttgggaacgatatctgaacgagaaggaacaaggctatgccgacatagccgacgacgtgcttccggtggtgggattctgatgactgattatgcttcgattcaccagccagtactgcttgagcagtgcgtgtcgctggtcgccccggcgttgcaggaccccggatccatcgcggtcgactgcacgctcggtctggccggccacaccatcgccttcctcaaagccgcgccgcaggcccgcgtgctgggcatcgaccgggatgcggaagcactcgccatggccaccgagcgcatcgccggggaaggactttcggaccgcttcatacctgtccacgccgcattcgacgcgttcggccaggtgcttgacgaccagggcatcgatcgggtgaatgcggtgttcatggatctgggtctgtcgagcctgcagatcgatgagacggaccgcggcttctcctacgcgcacgacgcgccgctcgacatgcgcatggacgtcagccagcccctgaccgcgcaacgcgtcctggccgagtaccccgagcgcgagctggtacgcatattccgcgcatacggggaggaacggttctcccgccagatcgcccgcgagatcgtgcgccgtcgcgcgcaggaacctctgacgacgtccgcccagctcaacaggctcgtcgacgaggtggtgccgcaggcgcaccgtcccgctggaaaccccgccaagcgcgtgttccaggcattgcgcatcgaagtgaacggcgaactggacaagctcgccggcaccctgccgcagatagcctgccggctcgccccgaacggccgtctggtggtcgagtcgtaccactcattggaagacaagacggtgaagtcgttcatgaacgaaggactgcgcgtggacgcgccggccgacatgccggtcgtccccgacgacgcgcagccgttcttcgcgccgctgacgcgcggcgccgtccaggccgggccggatgagatcgcagccaatcccaggtcggcgtcggtgcgcctgcgcggcgtcgagctggtcaggcccctgcctgcgcgctggcgccagcgcttccggcaggacgcgcaagtcgcccgggaccatgagtcggcccgggacgcgggtgaaaaccacggcagacacggcggctgcggcagacatgacgacatgacggcacgaaacacgacatcgagaaggaggggatgatggcctcgacattgcgaaccgcccgctccaacgcggcgcccgtggcaccggcggggcgcggctcggatggcgccgcacgccccgccgcccgcccgcagctgcacgtcatcgacggctcctcccagcgcaacggctcccggtccaccggcagcctggcccgtatcatcgcctggacccaggcgcgcggcgcgtcactgatccacgtcacggtcgccatcgtcttcctggtcgccacgttgctgataaccctgatgctgcgcacgcagatggttcagaactccttcgaatccaacacggtgcaaaaaaacatcaacatgctcacccaggacgtgcaggacgatcaggcgaaacttgacgagctgatctcgtcgctgcccgacaaggcgcagaagatgggcatggtgccccagcaggattccgtcaccatcgatctcaacgggtacaaacccagtaaggggtccgctcaatgatcggtcgaataaccgcaatgatacggttcgccagatgccgcaagttcctcttccagtgcatcgccatcggcgtcatactcgcgatggtcgcctccgcatgcctgttcaagctggcctccatccagctgatagacggccagatggccgcacaggcggcgacccaggcccggaccaagaaggtgatcgtccactcgatgcgcggcaagatcaccgacacgaacggcaccgtgctggcgcagagcgtcgagcgatacacgatcatcgccgacccgtgggcggcctcacagttcgagccgatcgactgcgacacgcagaaggcgaagcaggccggattctgccacaaggtcaacggcaagccggtcggggtcaagggatccgcgggcgtggcccgtctgctggcacccgtgctgaagatggacgcgaagacgctcggcgccaaactgaccggcaccagccggtacatgatcctgaagaaggacgtgacgccgacggtcaagcgggccatcgacgacctgaatctgggtggcgtggtctatggcgagttgagcagccagcgcatctacgccaacggcacccagctcggcgcgctgctcggcggcgtggacgattccggcaagggcgtcgccggagtggaaagcatggagaactccgcgctgaccggcacggacggttacgtcatctaccagcaaggtaacggcggcgaggagatccccggcacgctgaccggttcccaagaggccgtgaacggctccgacgtggcgctgacgctggaccatgacgtcgactggtacgtcaagcaggcgctgctggaaggccagaagaagaccaaggcgacgtgggccatggcggtggtccaggacatccagaccggcgagatactggccctggaggacaccgacgaataccaggcgggcagcgaccaggccaagctgaacgcgtcccgtgccgtcagcgaaagcttcgaaccgggctcggtgggcaagatcatcacgatgtccggactgctgcagaccgggctgcacaaggcgaccgacaagttcactgtgccctattcgtacaccaaggacgggcaggaataccatgactcgtccgcgcacggcgacgagcactggactctggccggcatcatcaagaactcctcgaacgtgggcgtggtcatggcttcgtcgcagtacacgaagaagcagcggtacgagtacctcacgaagttcggcatcggccagtccagtggcatgtccatccctggcgagtcgcgcgggcagctcggcacgccggaatcgtgggacgggcgaaccggcaacacgatcctgttcggtcagggatactccgtgaacgcgctccagctgaccaacgtcgtcgcgaccatcggcaacaagggcgtgcgcaagcagcagtcgctgatcaagtcggtcacccacgccgacggcacggtggagacgccgcaggagggctcttccacgcgcgtcatcgacgagtcggtcgccgaccaggtcaagaacgccatggaatccgtggccgagggatacagcaaggtggtgaacgtcaagggataccgcatcgcggcgaagaccggtaccgccgaggtcgcgggaagcgacggccggctgacctcgatcgtcgccgatttcgccggaatgatcccggcggacaacccgcgcttcgccatcaccgtgatcatgaaggatccgcagggcacctacggcggcatgacggctggcccggtgttcgccaagattggtgaattccttatgcagaagtacaacgtgccgacctccagcccgcgcaacgatgctattgcagtggactggtaaggggccgcgccggaaatccggcggggcgtcgacaaggaacatacggaagaaaggcggaagcgatgagcgcagtcagtgaagccgtcgcgcggcggatgacgttgggatatctggccgacacgtacgggctggaactcgacccggacttcgcttcgggggtcaccgtcacatccatcgcggacgacgtcgattccgtggctcccggatccctgtatgttcccgcgcagagcgtggacgtcaagcggctggaggaggcccgggcccgcggcgcgtacgctgcgctggtccccccgtcgatgaagcacgaggacggccccgcgcagatgccactgctgcgcgcgcgcctgacgtcccggcagctgggtgacatcgccagcgacatcgcgggcaccccgtccaacgcactcgccattttcgtggttggctcggatgacccgaaacgcagtgaacggtacgcgtcatgcgtagcggatttcctgcacatgctgggcaatcctgtcggcgtcgtgaaatcatccggctcgacgtcgctggagcgcgagctcgacctgacctacccgctgtcgatactcgacgtgcagcagacgctgtcggtctgcgcggaggacggcgcggcggcgatggtgttcgcgctcaacgaccgtacactcaaatccgatgcgctgaccagcgtgaacgtcgacgtcatcggcctggactcggcacgagacctgcgccagccgacgccgagcggcaccggcgaggattcgcgtgctggcgaaggcggcgaagcggcatctccgtccgggcagtgggcgagcggggaggagcccgccgggtcggctggcgacgcccgggacgacctcgcacaggcgcggcagctgggggcgggcttcggcttcgaggtcgacgagcagacccacgtcgcccgtgccgacgcgcaatccgacctgctcgcggcgcaggccccgttcgcctcggaccgcgacagtatccgtgaattgtcgctcgccattgccatggttatggcggcggggattcgcagaaacaacattcgcagtgcgctgcgcgtatctcacgaattggctcatggagaggaaaacaaggcatgaacgcagaggcaacgatgatgcctatgaccgttcggcaggtggccgaggcggtccaaggcaggctgatcgtcccgcagacgggcgacggcgtcgaagacggagccgatgcactggccacgtcggcggtcagcgattcgcgccaggtccgtgaaggctccgtgttcgtggcgatcgccggcgagcgtgtggacggtcatgatttcgtcgctcgcgccggcgaatccggcgcggtcgtggcgctcgtacaacatgaagtggatgcgccggtggcgcagatagtcgttcccgatacggtcgacgcgctgggcctgctcgcgaaggcgaacatcgccgctcggcgtgcggccggaacgccgttcaccctgatcggcatcaccggctcggtgggcaagaccaccaccaaggacctcatggccgccctgctgtccacgctcggctccaccgtggcgcccgtcggctcgttcaacaacgagatcggccttcctctgaccgcgttgaaggtcggccgggacacgcgcttcttcgtcgccgagatgggagcgagccatgtcggagagattacgcgcctgaccacgatcgcccctccggacatcgccgtcgtgctcaaggtcggatgcgcccatctcggcgaattcggctccgtcgagcgcatcgcgcaggcgaaaagcgagatcgtccaggggctggttcccgatgggctggcggtgctcaacgccgacgacgcccatgtggcggcgatggcccccctggcgccgcaaggacacgtattctggttcggcatggccggcgacgacgccgaagccagcgccggcaacgccgcatccgggaagtcggacgcactgttcgccagcgacgtgcggaccgacgacggcgaccgcccctcgttcaccttggaacgggccgatggcggaaccgcccatgtgcaattggcgattcgcggcacgcacaacgtgatgaacgccctcgccgcggcgagcgtcgcccacctgctgggcgtaccgctgcagtcgatcgccgagacgctgtcgcgtcagtcccgcatcagcccgcaccgcatggcggtgtccacggtccggcgcggcgggatgtctttcacgctgatcgatgattcattcaacgccaaccccgactccatgcgagccggtctcgacgggctcgcccggtggcgttccgatgaagacccgtaccgtatcgcggtgctgggagcgatgctggagctgggcggtgacgagtccgcgctgcatgagggcatcggcgagtacgcggccggcctgcccatcgacgccgtcatcgcggtgggcaacgatgacgagcatttcgacgcgctggcttccgcccttgcgaagggcgcgcggaagcggcgtgacgacagtgacggcaacacgccggaggtgcattgggttcacgacatcgatcaggccgacaccttggtccgagctcttgccggagaccatgacgacacggttgtgctgctgaaggggtcgcacgcctcgggcctgagcgccctggcgcaacgatggacgacagcggacggacagccgtccgaccacgaataggaagcggggaatctgagttgatcgcgttaatcattggcattctggtctcgcttctggtgaccatcgcgggcacgccgatgctgatccatctggtgcatcggctgcactacgggcagtacatccgtcaggacgggccgaagtcgcatctggtcaagcgcggcaccccgaccatgggcggcgtagcaatcgtgctggcgatcgtgctcggatggggggcgtcggcactgtaccgttacgtccgctcgggagcggttccctccctgtccgcgatgcttgtgctgttcgcgatgctgtcgatgggcctgctcggcttcatcgacgacttcgccaaggtgcgcaaaaaacagaatctgggcctgtcggtgcatgccaagttcatcggccagttcatcttcgccacgatctacgcggttctcgcgctgatcatccccaccaaatcggggttccccagcgctcaggcaggcatgagcttcattgagaagccgttcttcgacttccggttcgccggcggcgtggccgccgcgatcatattcgtcatctgggtgaatttcctcatgaccgcgtggacgaacgcggtcaacctgaccgacggccttgacggcctggcatccggttcgtcgatgatcgcgttcgccggatacgccatcatcgcgttctgggaaagctaccatatcaagggcggcacgcacgaagggttctcgtatgcggtgtccgatccgctcgacctgaccatcatcgcctgctgcgcggccgtcgcctgcttcggattcctgtggtacaactcgaacccggcgacgatcttcatgggcgacaccggttcgctggcgctcggcggcctgttcgccgcgctgtccatcgccacacacaccgaattcctcgccatcatcatcggcggcctgtacgtaatcgaggtgatgagcgacatcatccaggtcacctcgttcaagctcacgcacaagcgtgtgttcaagatggcgccgatccaccatcatttcgagcttctcgggtggagcgaatcaaaggtcgtcgtgcgcttctggatgatcgagttcctgttcatgatcgtgggcctgatgatgttctacgtcgattgggtgtcccgatccgggttgctgtttgtctgaacggtaccgtgacggctccgcgccgcacagcgtggcgtgaccgccgcggtataggcaggttcgcatgagagcgtccgccggttcggcggtgcaatgacaagggagacgatatggatctcagtgacaagaccgttctggtggccggtctgggtatatccggccgcagcatgatggaagtgttgcgttcccgcgcagcgcgggtaatcggcgtggacgagcataagccggaggccgacctgcattcgttcgacgacatcgactgggattcggccgacatcgtcatgacgtcgccggtgttcaacccgcgcacgccgttcatcctcgaagcccaacgccgaggcatccccgtgtacagcgaggtcgagctcgcgtggcggctgcgcgtggacagcgcccgcaccggccgccccgccccgtgggtgggcatcaccggcacgaacggcaagacgtccacgaccgagatgacctcggccatgctgtgcgccgatggcctcgttgcaccggcggtcggcaacatcggcaaggcggtgtcccacgccgcggtcgatccggacaacgacgcgctgtgcgtggagctcagctcgttccagctgcatttcaccgattcgctggcgctggattgcgcggcgatcacgaacatcgccgacgaccatctcgactggcatggcggcatcgaagcgtacgccgccgacaagtcgaaggtgtttcgcaacgtcaggcgcgccctggtgttcaacgccgacgaccggcgcgtcagcgcgctcgcctcggcggcgcataccgccgagggatgccggcgcatcggattcacgctcggcgttccccatcccggccagatcggcgtggacgacggctggatcgtcgaccgcagcggcgtggccggcggcgcattcggcgatgagacccgcctggcgccggtccaggagttcccccacctgtgtgagccggacggcaccgtgtacccgcacctgctcgccgacgcgatgaccgcgctggcgttggcgctgggaatgggcgtggacctcgataaggcgttggccgcgctgaaggcgttcgcccccggcggccatcgcatccagacggtggcgacggccgcgacgggcgacggcggctcgatacgcttcatcgacgattcgaaggcgacgaacgcccacgcggcgcgggcgtcgctgagcagcttcgcccccaagagcgtggtgtggatcgccggaggactcgccaagggaagccgtttcgaacagctcgtggcggatcaggcgcatacgattaaggcggccgtcatcatcggcaaggaccagaagccgatgcttgaggcgttcgccgccagcgcacccggcattcctcttaccgtgatcgagcccgagccctcggacacggtgatggcgcgcgcggtcgatgccgcaggcgcatacgccggcacaggtgacgtggtgctgatggcacccgcctgcgcctccatggaccagttcgtctcctacgcggaccgcggcacccagttcgcgcgggagtcctcacgatgggtgacgcagtatggcaagtgacgatccgcggcgacgcgcccgctccgtaagatccggccagccttcgcggtcggatgctggttccgcgggcgcgggcactggcacgggcagacgcacggggcaggattcgtccgcctcccgactggccgaagctcggcgggtcgaagagcgtgacgcccaacggctcggtaggttcaccggactgcgcagcctgctcaacccgctgtggtgctatcacggcttccgggccgccgttgtggtgctcaccggcttcggcgtgatcatggtgttctccagttccaccgtgtcgatggtctccgccggccgatcgccgttctcgcaggccatcagccagggcatgtactgcgtgatgggtctggtcgtgggcgtggttttcatgtgccttccggctcgtatgtacaggcgtttcagcttcgccgtggtgttattcgcgatgctgctgcagctgctgacgttcacgccgctcggcgtcgaggtcaacggcaatgccggctggatcggcaagcgcggcgtgttcacgatgcagccggccgaggtgatgaagctcgccttgtgcatatggcttccggcggccctgcactgggcgaagaaacacagcggtaagatcggcaagttgcgggcatacgcccccctgacggttctgtatctcctgtgcctgggattcgtgatgctgggcaaggatctgggcacggccatgatcgtcctgttcatcggattcgtcgcgtttcttctgggaggatatccaggcaaggtccttgcggcctttgccgccctgggcatcatcggcatcgtgggattgatcgcatacagtccgaacaggctgaaccgcgttctggccgcgtaccaggagtgcagcggcaccgatgcccaaaaggtctgctaccagtcgatacacgcgaaatacgccttggccgaaggcggtctgttcggggtaggcttgggcaactcccgcgagaaatggaactatctgccggaggcgcacaatgatttcatcttcgccatcatcggcgaggagaccggtttcatcggagcggccatcgtcatcatactgttcgtggtgctgggaggatgcatgatcagcgtggccctgcagaccgcggatcgttacgcgtcggtcagcctgctgtgcatcaccgtatggcttgtcgggcaggcgctgatcaacatcggcgtcgtggtcggggttttccccgtcatgggcgtgccgatgccgttcgtctcggcgggcgggtcgtccctgatcatgtgtctggcggcggccggcgtggccgcctcgctcatgcgcgcccaacctcagatcaaggccgattcgtcccgcgcctgaccggaggcggggctgtcggcgaagccagctggggtggccataaggccctgccaacagggcgaaatatgtcaaagtcggcttgacgaagccgcgttttttcatcactcacgctaagctcggagattatgagttcatcacctgtgcatatcgttctggcaggcggcggcaccgccggtcatgtcaacccgttgctggccgtggcggatgcgattcgccgtatccggcccgaggcttccatcagcatcatcggcacggccgtaggactggagcacgaccttgttccccgcgccggctatgagctggacaccatcgaaaaggtcccgttcccgcggcgccccaacaaggccgcgctccagtttccggccaagtggatgcgcgagacccgcaaggtccgcgatatcctgcgttcgcgtcacgcggacgtcgtggtcggattcggcggctatgcctcggctccggtgtattccgcggcgcacaggatgggcatacccgtcgtcatccatgagcagaacgcccgagccggcatggccaacaagctcggcgcgcgttacgctgcgttcatcggtacggcgtacgagaacaccggcctcaagccgggatccgggtgccgtatggagcgcgtcgggctgccgttgcggccggcgatcagcacgctcgcggcgcagttcgcgtccgatcgcgcgtccgtgcgccagtcgggggccgaggcgatgggcatcgacccggcgcgtcccatggtgctggtcaccggagggtcgctgggcgcggtcagcctgaacagggcggtggcatccagtgcctcggtgctgctcgaacacgcgcaggtcgtccatctgaccggcaagggcaagatcgacgaagtgcgctcgttggtgggagagcgcgccgatgccggggtcttcaccggtgtgggccccgattcatatggcaagggcgactatcatgcggccgaatatctggaacgcatcgatctggcgttcgcatgcgccgacctggtgatttgccggtccggggcgggatcggtgtccgagctcgccgccctgggcctgcctgcggtgtatgtcccgttgccgatcggcaacggggagcagcggttcaacgcgcttcccgtggtcaaggccggcggcgggctgatggtggccgacaaggatttcaccgcgcagtgggtgcagtcccatgtgccgtcgctgcttgccgaaccggaccggctgcgcgagctgggcgacaaggcatgggagtacggcattcgcgacgccgccgacaccatggcccgtcgcgtgcttgaactggcgtaatgcggcgctctgattggcgtcgggtatgaccataatggtgaccagtatgaatcatcaaggagaatctgcagtgtctgaagcgcaaaccaatgccacccctatcgtcctcgacccgatgaaggtcgcgttcgcgcccgacgcgacggtgttgcaactgggaaggacccatttcatcggcatcggtggcgccggcatgagcgtgctcgccgaaatgctccatgagcgtggcgtcgacgtcgacggttccgaccgtgaggaaggctcgaagaccgaacggctgcgatccctcggcatcaccgtcgaaatcggccagcaggccgacaacgtgcgtggcgccgacaccgtggtgtactccagcgccatcaagcccgacaaccccgaaatcgtcgcggcgcacgagcggggcatccgcatcgtgcatcgcagcgacatcctggcgttgctgatgaacggccgccgggcggtcaccgtcgccggagcgcatggcaagaccacgacaagttcgctgctatcccacatcctcgtccatgccggaaccgggaagctggccgatcccagctacgccatcggcggcaccatccaggcacccgggggagcggtactggacggcgggcatgccggacgcggcgacgtattggtcgcggaggcggacgaatccgacggcagcttctgcaagtaccgtccctcgatcgcggtgatcacgaacgcgctcgcagaccatctcgaccattatggcgacgaggcgcattactgcgccgcgttcgtcgaccatgcggggcatgcaagcggacatgtcgtcatgacgggcgatgacgagggtgccgtggccgtgctgcgcgacctcgacccgtccgtggcccgtcgaacgatcgtgtacgccaccaaggatgccgaccagatcggggacctgtgcggcgccacgctggtgcgcatcgatgccgagcatgagagcgccgacagcggccgggagaccttcaccgtccatgtgccggcgtcgctcgcgtcggtctgcggctgcggcgacgccgatctggcgttgccggtcagcctcgccatccccggcatgcacaacgcgcgcaacgcgaccgcggccatcctggccgcgatgctgctgggcgtgacacccgaggccgcagcccaggccgcctcgacgttcctcggagcctcgcgccggttccaggtgcgcggcgaggagaacggcgtgacggtggtcgacgattacgcgcatcatcccacggagatcagcgcgctgctcgacgccgcccggcgccggtacccgcgttccgtcatccgggtgctgttccagccgcacctgttctcgcgcacgcgtacgttcgcccacgagttcgccgaggcgctgtccaaggccgatgacgtcatcgtcaccggcatcttccccgcacgcgaactgcagcgggacttcccggacgtttccgccatgaccatcgtcgatgccgcgcaggacgtgccgcacgcttcggcgcagggcgacgggacgtggatcagcgcggtcgacgacatgcaggtggcggctcagatgctggcgatgcgctgccgtcccacggacgtggtgttcaccgtcggcgcgggggacattaccgccatgggcgcggtgatcctgcacgcactgggggcccggcacaatctcggtgaccgctgatggcacggcgggtcgtttcctcacatggcgatgccggtcgtgaggccgggcaagggtccggctcgcgcaagccgcgcacgacggcagacagggcctcatcgtcgggtgtcgaagccaatcgcgtcgccgtgacacgggaacgccagaccaggaaaaagcctcgcaccgcgtcgaatgacgtgtcccggaaggctgcatccggaaaggcgtcgccggggagaaccacggtcgggaaggcgacgggccggcagatgacgtccggcaggaagtcggaaaaggccttagaaaaagagacttcccgacaggcaaagggcgggaaaacagtctcccgaaaatcgaggttcggaaagacggcgtcccggagcgtttcgtcgtcctcgtcccggtcggtatcacgcgccgaaggtttcgtcgacgcacgtcgcctgcacagcgaggatgtggtcaagaagacgctcgatgagaacgtcggcgtgctcggcgtggcgacccgtcccaaagtgctggatttcgacgcgcgcctgaaggagcggaagaaggcgggcacccgggttgccgccatccgcgtgctgattgtgatattggccgcggcgctggtgtccgcgctgatctggcttctgttgttctcatccgtgttccgtctggaaacctcgcagatcagcgtcagcggcggcaacgaatgggtgagcgagaaggatgtgctggacatcgcgaaccagcaatccggcaaatcgctgttcctggtctccgcagacaaggtcagctcgcagctgaagaacatccccggcgtaacccaggcgaacgtcgtcaaacggtatccgcgctcgctggagattgacatcaaggcgcagcagcccgccgctatgctcaaggaaccagatggaaccctggtggcggtcgaccgcaaggcccgcgtgctcaacgcggtgggcaaggcgtccatgaaaggtattccggtcatcgaggtgagctcggtggacaacggcctgaacagccgcgccgtcaaggaggcactgaccatcctcggcggtctgcccgacacgatgcgcaccgtcatcaccaaggtgagcgcgaaaacgcaggattccatcaccaccgagctgagttccggcaaatatgtcgtcgtctggggtgattcgtccgagttgaaactcaagtcggcgatcgtcgacaagctgctcagcgacccatcgctgataggagacaagcatcagatcgacgtgtcggccccgagccgacccatcattaaatagcgcgcgtttcgccgtgggcaggacgcgaaacgcgggtgaaaatacgaaaagggccgcatgatcgttggaatcatgcggcccttggcgagtggagccgagggggaagcagtcgaactcgacggcttcccctttaacaaaaggggattcgtcggtccaatactcatccaacgagaaccagtcccgccacgtgatttcctgcctgtcgtcctcggagaaccacatgctcacgacgagcttgtcatcgtacagatagaccttgtccacgaaatactcgaagacctggtctcgaatctccgggtcgttcacgtcggcgtgcaggaacttgtcgaagtacgcctggatgctgtgcctgtcctcgcacagcgacacgcggacgttttccgtccctatggcatcgttcagggcgctcttctgctcctcgagctgcgcgaggcgttgtgtcaccgtatcgctgaccacgcccttctcgatgaccttcacgaggttcgcgaggctcttctccacttccctgcgcttcgcctccagcgcttcgagatacgcggtgtcgtcgtggctcttctcgtaatactccgccgcatccagggcgagcgccgtcacgttctcctcgtcgtcgacgatgttgtgcagggcgaacagcaccatgtcctctaggtcccgcttgcgggccttgtgcaggtggcactccttcctgcgctgggcggagcaatagtagtagtaatacttccgtccggtcttgctcgtaccggacacgccctgcatggtgcttccgcactcaccgcaatagagcttgcccgtgagccaatagcgcggggcctcggcgtcgtccatgccgtgcgcccgctgggaacccttgcgcttgttctcggcgaaccgcctttgcgcgcggtcgaaagtcgcctcgtcgacaaggacgggcattccgccggcgaccgtgatgtcgccgtggtggtactcgccgatgtaggcgcggttcttgagcatcttgttcagcatgttcacgctgaacttcgcgttcctcggcgtgcgcaggccctgcgcgttcatctcctcggcaatggccttcagcggcctgcccgacgcgtattccttaaacgcccactgcacgaacggcgccgtgttcgggtccgggacgtacttcttcgtggacctgtccacgtcgtagccgaacagcttgtggccgttgtacagggcgtgctgcgcgttgtagtccatgccgcgctggatgttctgcgacagctggcggctgtaatactccgccatggcctccatcagcccctcgatgaggacgccttcgggtccctccgtcgggatgtgctcggccagcaggtgaatctcgcatcccgcgtcgcggattttcttcttcgccatcgccagaacgtacttgtcgcgtcccagacggtcggtcttccacatgatgagggtatggggacggatttttgcgacttccgacagcatctgctggaaccccggtcgtgcgtccgtggtgccggatattgccgcgtcctcatactcttttacgatttttagtccgtgcgcgtccgcccaatcgtgggcaagctcgcgctgctggtcgatgctcgcgtcgttttgcgagtgggacgagaagcgatagtacgctatcgcaaggttgttgtcgttcggcgcgaatttcttcttacgtgccataggtttaccaccccctgtcttttctgcttataggttttcacgtctattcctcctatatgatgaattgcgtaaatacgcatttaattataaagcccgccgctctcatgaaacggcgggctgttagcgtctatacgaacatctgctggagcaggcccttcttcagttcctgccacttcgccagctcgcccttcgacttctggataacctcatccatcgaagcaaggcagtcggagattttgcgctgctcatctttatcaggaacaaaaacaggcatttgcatgatatgagccttgtctccacgaggcatctttgaccccttcgcagctgacataacgtaggcgacaaaagcatcagaggcaatcacataatgcagaaaatccggcacaacattcgtcgggtggaatacgagtacgtccgtgctgcaagcgccctcacaatccgccgtccagactttcttcagatatggacggatattcgacataagcgtgtcgcccggctcgtacaaagaaccagttccttcattctccccgtttttaacagcgacgcctccgaaatccttcaacagattttccgtaccaatataatttctgccagtaccacgatttgtcccgtattcgcagagcttattcaagcgcgttttagtccaatcaggaaactcgctcccgtcatcggccttgaacctgacctcctgactgaacagcttctgcatcacgcccttcttgcgctgctcccacgcatcgacctccgcctgctgcgcggcgatgaccgcatcgacggcggacagaaaatcagcaattttgcgctgctcaggaagggaaggacgcttgactttaatttttgaaagctgaggtgccgtcaactgcggaacaccagttgattcaataaaaactctcgtatagtttatctgctcagcaaagaaatcaacgtcatcatccatgtttggctggcaaacaagcaaacggacaatgggcacgtacatacaatgtcgtgccacggcgtgtcccacatcgccacgtcccgttacagtaaatgtgtcgccgtcaattttgtaataattggcatatccatatgtcccgttattaaccaatgcattggcataaactggataaggataatctttggactgctttgccgcgcagttgttcttatcaatatccccacctgcggaaatatggaacaactctccaagtgtcttatcttcccaatccggaaactcgcttccgtcatcagctttgaacctcagtttcggttctcccatgcttacacctccttcagaaccaaatggatatacatttcgaatactgccagcaaaaacaaatcttccatcgtgtctatggtttctcccgcatatccacccggtgcaccgtattctttatccgagtccacatcctcgctgccgtatattgcgatgaactgcgcaaggaccgtcgcaaactgacatgcttcgttttccggcacccccttgaacccgtacttgcgctcaagggcagaaatagggtgctcgggaccatcaccccggaacgattcgcttaaaacatctgtgatacaacattcataagatgaagtgccatcagaattaacagctaacgaaccggccgcatatggcgaacgataattgattcgttcaatcggaatcttctcgccaccatagcattcgaggctgcgtagcacgtacttgcccccgtcatagaacggagactcatcgtcatggaaacgcgtgcgcaagacttcctccgccgctttaatgcaccgcccaaagagacccttttcctccgtaacgcgcaaatccagtccgcagtattcaaggacacgattctgtgtttcgagcgtcatgcagcaaaactcgcggtacatctcgcgcgaatagtaatacaggtcgttatgcatcgctgccatcgcgcacagaggtatcaggccgcggtctgaataatgcttcgatatgaaggaaaccgcctgagacttcacttcctcagcgtggcgtcgctcgtcgcgctcatcctgacgtcgctcgaatttctccatgcgcccgctttgccacagctgcaggctcgcaatcacgatggtcacgacgagggaaatcgaggcgcaaattatgcttatccaatctgaacaggtcaattacgcccctcctctcatagtctcagctgatgcagcatcgactcgaccttgtcgatagcggccttcttctcgctctcgatgcgcttgaggtcgtcgcgcacggcagcaaggtccacaggctcctcttcctcgaacgtatcgacgtagcgcggaatgtttagattccagccgttcgcctcgatttccgccatgtgcgccacatgggcgaacttgtccacgtccacgcggttctcgtaagcctccacaatcttttggatgtgcgcatcctccagcgtgttctggttcttgccgggcttgaactccttgctggcgtcgatgaacagcacgttgccgctgttgccgttacgcttggacttcagcaccagcaggcacacggggatgctcgttccgtggaacaggttcggcgcaaggccgatgaccgcatcaagacggttcaggtccttcacgatgtacttgcggatgacctcctcggcaccgccgcggaacagcacgccgtgaggcaggagcaccgccacgcggccgtcgttgtcatccatgtgatagaccatgtgctcgacgaaggcatagtcagcatgggacttgggcggcagcttgccggcacctgaataacgggggtcgtccaacagcgccgggttcccgtcgtacttcagggaatagggagggttgcacacctgtacggtcatcttcacgtcgccgtacttgtcctcccgcagcgtgtcgcccttgtagatgtcgaaatgctgatagtccacgccgtgcatcagcatgttcatgcgggcgaggttgtacgtcgtggcgttgttctcctgcccgtagaagtgccccacgcgtcccgtggtcaggtgcttctgcacctccagcagcatggacgccgaaccgcaggtgcagtcgcccacggtcctcgcctcgtccagacccacggtcgccaacgtcgccaccagcttcgaaggcccggtcggcgtgaagaactcgccgctcttcttgccggcatcggatgcgaacagcccgatgagaatcatgtacgccgtgcccagcacgtcgaactgcgagtctgccagcttgaagtcaatctcgctgattttcacgatgaccttcgcgatgagcgacgtcctcgccgccacggtgtcacccaaatcagggtcttgcagcttcatgtcgttgaacagaccggaaaacgccgcctcggacgcctgccccatggtggagcctgtcagctcgttcacggcacgctcgtaatcctcgacattgaagcggtcggcgtcgccgtcgggacggacaatcctgcgtaccagctcatcgaacaggttctcgggtcggatgatgtaccccagatgctcgatggaccactgctcgaccaccggacggtaatcgtcgtccgcgaacgcctgctcgtaggtcaggccgtcctccttcaggatttcctgcatgtagtcctcggtgcgctccgacagatacctgtagaaaatagtcccgaggatgtagtttcgaaacttcgtggaatccatgttcccgcgcaggtcgttggcgatggcccagagcttctgggacagctcgctcgcctgcgcctgatacttcgttgagtcaatcatacaagtctattctccttccgccttgtaacggctgtatgtgctgacgacaaactccttgatagcgttcgtcatcttcgtaatcttcaaaagccccatgcggtacggcgcgaggcgcttgcgaatgtcctcttcggaaatactcccgccgaaggtgtactccgaaaagatatccaagacgtcctgcgcctcgacgccgttgtcgtacgcgaaggactcaatctccgcttgcaggctctcgcgctcgaactgctcgtacgcctgctgcacgtcggcgtcgtccggcaaatcgtagaatctcgtgcggatgaacgcctccatgatgtccttcttcgcacggagcgcgtcgttgtccgagcgctcgatttcgcgcatcaccaagtcgatgtcgcgggcacgctcctcttcggacttgtccccgtcgtgggcggacttcagcaggctcaggatgtacatcacgttgatgcggtcggtacgcaccagctccacgtcgaaatcgacgtccaccggcacggggaccttcgggtccttcttcttggcctcgtcgtgatagtacagataccagctcttgtagccctcgtattcctcatcgtccagcacgacggacaaatccgcccaatcgaacttcccgaaagtcttcaaggtcgccagcgtgccggacatcgcgcggaacgccaccacgaacttgcggatgtcctcctcgctctgaagctgccccgcgtcgtcgacagtctgcgccgccttgcgcagctggacctcctgattcatccactggttcacgtaatactcgtagctctccagcagatactcgttcgggtcgccgtcgccggagaacagcctcagcgcgtcgtcctgcgccttcttgatgtcgcggtaggacacaatctgcccgaactgcttcgtcaccttgtccacgcggttcgtgcggctgtacgcctgcacaagcgtgtgccagatgagattcttgtccagatacagcgtgttcagcggcttggcgtcgaacccggtcagcatcatgttcacgaccagaaggatgtcaacctgcggaagctccttctgcttcatgcgtttcgcgatgtccttgcggtaggcgtcgaatgaatccaggtcgaatgccgtgccgaacattccgttgtagtcggccatacagcgagccagcagctcttgagaatgctcgtcaccgccctcgtccatgtcctcgttcgcctgataggtgaatatcgccgcgaccttgtatcgctcgtcatctggacgcgcttcgttcagctcccggaacgcgtcgtaatacttgccgagcgtctggatggagtccaccgcgaacagcgccgtgtacacgtccttgccctgcgggtggacatgctgctcgtgatgctcgaagatgtccgacgcgacgacgcggatgcgctcgtcatcgtgatacagggcgtccaaatccagattgtggcgcctgcaatactcggggtctccgagacgctccgggtcgatgccgctcgcggacacctgcttcgcgaaaatcgtccgctggtactccaccgagaaccgcagaacgttgccgtccgcaatcgcgtccttaatcatgtagcggtgcaggcaggaatccagcttcgagccggcatagaacacatcggcagtcgttctgccgtccttgcccttgttcgcctcgaagatgggcgttcccgtgaagccgatgtagttcgcgttgcggaaatgacgctcgatgtcgccgtgcatcttgccgaactggctacgatggcactcgtcgatgatgaacacgaccttcttgtcgcggtacgaatccatcagctgctcgtaacgcttgctcttgacggcattcgccatcttctgaatcgtcgtcacgatgaggccccggtctgcctgccccagctgcttcaccagcacagccgtcgagtccgagccgtcgacgcaccccttctcgaaggagttgtactcgtcgaccgtctggtcgtccaaatcctttcggtcaatcaggaagatgaccttgtccaccctcggctcgtcgcgcagaagctgcgccagcttgaacgacgtcagcgtcttgccggaacccgtgcaggcgaagacgtatccgttctggttcgactccagcacgcgccgctttgccgccttcacggcgtaaatctgatacgggcgcatcaccatcaagacgggttccgttgtcttgatgaccatgtacttgtccagcatttccgtgatggtcgaacggcgcaggaagtccgccgtgaactcgtccagcttgttgatgcgcttgttcttgtcgtctgtccagaagaacacgaggctcttcagaatcgggttgtacgcgccgccgtccatctcgttctcgttgcagaaatacttcgtctgcaccgaatttgacacgacgaacagctgcaaataccggaacagtcccttgaacgagaacttgcggtagcggttaatctggttgattgcctcgttgatttccacgccgggacgcttcagctcgacctgcaccaccggaaagccgttgatgagaatcgtcacgtcgtaacggttcttgtacgcaacgtcgtccttgtgttctttatccatcgtgacctgatgcgtcacctgatagatgttgcggtcggtatcggaactgaagaagtccagatacacggtcttgccgttgtccagcgcgagaacgtacttgtcgcgaagaatcttcgccgactcatagacgctcttgttatccacgtgaatcatcacgcgcccgaactccgcatcggacaacgtcgcctcgcccttggcctcaaccagcttccgagcgttgaacgccgtcagctgctcgcgaaagttcgcgacgacatcgtcgtagttcgccatgtcgacgaacttgtagccgatactctcgagcctgtctatgaaaaggctttcgacatcatattctgaaacatgcgccacttactcatccacctcctcaagatgctcctgcacccactcgtggatgattgcggcaatcgtcgtctcgcgctccgcagccatcatcttgagcgccttcttgtcgctcacagtgagcgacagcgagagcgtcgtgcgcttctcgtcagcggccgtgtcggcgacaacggccttctctatcttcttctgctcggcctcgcggtcggcagcatacttctcgaacatgttcgccatggcggctcgacctcctttaattatttacatatttgtacaattatacatcatcgagacgcatttgtccagatgggcaacgcctctgacctgcggttattccttcgggaaccccgctgcctcgcgcaccgtgcccaccagagcgagagtcgccttcgcagccttgccgcgtcggtcgaactcgaccacggacttgccggcggctcccgcctgaacgaacgcctcggactggggcagcttggccaccgtctggtcgcccgccagaccctcgaaccactccatgaagtcgcgggacgccttgaagcggttccacccgttcatcacgtagacaatcttcgcgcggccgttcttgaacaccgccttgcgcatgcgcatcagcggctcgatgtccctcgacgtggttctggtcgggatgaccaccacgtccgcctccttcagccagtccgccagcccctcctgcaaggcccccggcgtgtccaccacggcgacctgcgcaccgtccgcctcatgcgtcttgtgcagagtgccgccctgcgtgtccaggtcgtagaagctcacggggatgccggagcgctcgaatgagaaggcaatctcgtcggcgaccaaggacttgccaacgccgcccttctgattgcacaccagaatcgtcttcatatcctcacctcgctatatatttaatcaattacgcatttccatatttaattatatgggccgacaatgcgttttcaactgccactttcggggctttatcgggtcttcatcagggcttttgccggtctccaaacgggcttcacgccctcgcttcgctccgtccgttccgccgcgttttccgaatccgactcataaacgagcggacgacgaaaaccccgattatccgccccttgcgcgtacgtccatcaacagcccttctgaaggtcttttcgcagcccgcgagcgggagcttgaaagggagcagcttgacgctgctcccttatcttctcggctactcgtcgaactgcgtgtccttgtccgccgacctcggcgtcctcacgggcgcacgccgctcggcctccttgacacggcgctgcatgcgctcgctcttcaggcgcctctcgcgctcgtcctcgtcggacagcgccttctccgccgccttgaggcgcttctcggcatcccacatgctcttgcgggactcgtagacgcgccgctccgcctcctcgcgctgcctgcggcgctcctccgcgagcgcctcctgaatcatcatgcgcagcatcaaggcggtcatgtcggccatcatgcgggacacggggtcacgggcgttgcgccccgccttggcgaacacatgcatgccggccagaagccccgggcacgggctttgcagggtgtcgcgtgcctccttggaggcatggaactcgcgccttgcggcgtccacgtcctcgcgcagcttcgccagctgctcgtccgggtggttgtgcgcctcgacaatctgctgatagcgctcgtccatgaagggcttgcccttatcgcgtgagcggtggatgtgcgccttctgaaggtcggacgccatctccgacacgtacgcccggtcgaggtcgtacacgtcgagagcggaatctgcagagggctgtgctgccggctctgccgtctcgggcacgtcgggcgtgacttccggtgccggggcgtcctgctcctgtgcctcaagctcgcgctgcttcgcctcgaagtacgcctcgatgccctcgcgggtcaggtcgtcggcgaggttggaggcacggcgccttctcttgcgcctgcccttgccgtaggggtcgcgggacttgtagctccagcccacggtctcctctccggtcctctcgtcgaccttgcgggtctcggtccgctcgacgccgcgaaccttcagctcctcgaggaactcctccatgttgctcgcatggtcgcgggcgtccgccacgcggttgcccagaacgcgctcgaaggactcgatgccgaactgccctttgcgctcggcccatgtggtcttctccctggcgggttcgggacccacgacggtgaaccccatctcgcggctcagccggtcgttcttgcgcttcacggtcgcatggtcggtgccgtgcgcgatggccgtgccggacaccaagtcatggttcgctatggtcgcatggacgtgcacgcagccgccctcgccgtcggtgtggaccgtgacccagcagggggcgttcggggccacttccttgcacaggaggtagccgtattcgcacgcccgctggatgtcctcggggctgtcctttgaaagctcctcgggggaccacgagacgcgcagctcgtagccctcgttcaacctcgtcccctgactctgcctgcgcatggcggagcagaaccggatgaagtcctcgcgggtgcccatgtcgcccatctgggcggcgatgcggttcgtcttctcgcggatgttttccgtgcgcttctttccctctccgagttccgtgtacgacatgcgcccgcggacgttcggcaggggctggatgtgcgtcgtcgacatcagcttccacccccttcagaaagaatcttctcgccccgctcgccgtaccagtaatcgcacagctcctctaactgctcggggacgtccggccacagcagggccatggcgcggaacacatcgttgccgaaatcggtgcgcaggccgtccacctcatcggtcagcttcgacagctcgccgcgcacctcatcgaggcccgtcctgcactcgccgagcacgcccggggaaagcgaacccggatgcgacttggactccgcgttcagcacccgcgcaatctggttcacgttgacgccgatgctcttcgcctcggatgccatacgctccgcgtcggcgttcctcgtcacgacgtacgtcggctcaacatccccgccctgtaccttctccacgcaactgcggagaaatgcggagcgggtcatctttttctcggagcaaatcgcgtccagcgcggcaagctcctcgtccgaaaaccgaacctggaccgtgcgctccttgttcggcttcttagccgcctgacggcgcacgcggctgctcctcatgtctgaactcacacccacgtaaaacacctcctttttttaatgcaacgtgcgcgttgattttctacgacagaatcgacgctaaaaaaggagcgagcatgggacttgtccctacaaaacttcagatttttctacaaagtagaaaattcctccgttttgtcgttacacgtcccgctcgcgagggggcagttttcactgcccccttcgaacccccagatgcgccccattcccaaccagcttccgccgacgactcggcgaagcatcccattcggaacggggcgccccggacaccccttgcggggtgccggacaggaggcacgactgcctcgctacacgccctcgccatagcccgccacgggcataggctcgcgtccgtccggggcggacgtgccgcccgaatcggacgcgacgggagcgccgtttcgggcaggggcggcaccctgcgaaggcgccttcttggtcaagagcttgtgcaggtagcgccccgccttgcgcatgtcggcgacgctcatgtcgcccagctcggggcagctctcgtacatcgccttgccgatgtgcttgaagcactcgtcgcggcgctgctgcatctcctcaatcgccttgtcgatgtcggaaatcttcttcttagtgctcatgatttattcctcctaatcttgtattggagccaagcgcccatagtcacgaaaggcgatagctccgactattgaaacgaaaaacgtgatggcgaaactcaagctatcaatacggcggaagctggtggtaaaccagaacataggaaagcagattgacaaaccaagcccaggtccgagtgcgggttgccgcctgtatcagacttatggcagtgattgtcgcaagcggaatcagggcgacggtgaccagaatctttgcaatgccaagcccgtacggcttgcccttcttcttgcccttgggaatcaatttctccatcgcatcaaggtgctttgaatacagctcacgctcttccgccgtgagcgttccatcgctcgcatgagtgcgaagcaacgtgacctcgtcgggcgtcaagacgtccgcgtctttgtcattcttaggtgccttgttgatacctaaaccattcattcctttgttcctcctttaatcagccattgccgaggtcttcgatggtctgcttaccgccattggcttgttcctcgacggtcttaccttgttcctcggctcgtttcttcgccgcttgataaacctcgctattgcggtaaacggcatcgacaaatgccgcatcgttttgaagggcatcggcaaacccgccgactacgttctcgcttagcaaataatcgcggaccgaatccttgacgagaagatgatggaagctgctcgtgatgtcatcgaaaggcgtatttgcttcctctgattggatgtagttcgcgtacgtccttatgtcgtaataacgagaatccagaccttcgacagcaatcggcgtaagcgcctcatttgtattcggcatctcgccggtcaacgcgtagcccagctgatatgacgtatagggaacaagcaggctcaactcggacagcttgcaacccgaaatgctgaacagaccgattagagccagcaatgccaacgagacggcaccgcgaaagatgatgcacttctccaccttgggcgaatatgccttgttctccgcttcgactgaagcaccggcaagcgcaagggtctgctggtaatcctgatagagcagccgctcgttctcatcaaggccgtcgtggcgtgccttcagacgccactccgcaaccttctcgctctcccatttgaaacccttcttaggcggtacagcacccgagggcggcgacggaacagcggaaagctgctccgtcacatagtcgtcgtacgcccgctgctcttcgggcgtgagcgttccgccgtgctttgccctcaggcgaagtcgagccagctcatcaggcgtcaaattgctcatgatttattcctccttaatcgttgaatcagttgctgccgcatcttccgaagcagccacgcctacgcgaacgagaccgcgagtgcgtttcgaaccgtgatacgagtagtcgcgacttggattcgggccttgaaaccacagctccttccactcaaagacgtcatacatgccaatcaatttctctggcgttacgtacatctcgtcggggatggaaacaggattgtccgaatagtcccatccttcgtaatcggagatgattcccttgacgtcgttgatgagcgacttgcggctctggcatcgcccgctcgggttgttacgcttaaaccaatggcgatacaaatcgaatacgaactgccacggcaaaacgtcccatgtcgcccgtatgagaacgtcgtcaaggaactggcgaaccgggtcgttcgtcagacgaaactcgtccaacaggtcgacgcacgcgtccggctcgtcaagctcgtagtagtccgtttcggcgagtacgtggtacagcacgtattcgaggacttcgggtcggttcaggtagtcgcccttgatgtacttgcgctcgcagccctcgaagcgcttctcgaacggaatcaccagcaggcggcggagcatggattcggacttatcccgaaccctcggaatctcgttgacgcactgcaccatgaaaccgttgaaaagcacgtcgcgcgggtcgcggttcttgcggttcatctggaacgggtcgcccgtgatgatgctcttgagcgacgcagcgtcgtccacgaacgtgcccgtgtcgttctcgtcggtgataatcacggacgcatgcatcagcgacgtgagcatgaaatccttgccgaagttcttcagcggaatggaagtccagtcgcccgctccgcaaagattgcgaagcagggtgcagagcgtgcccttgccgttattgccggaaggggaatagagccatgcggatttattccagctcacatacgggcgaaccgttgcgccgataatctgccacagaagcgagaccacatcggggtcgtcggacagctcgttcatccacgacacgacatcccagtccgtgccgtcctcgtcgttgtggatgacggggtttcgggcacggtcaacgaaatcgacgtgcttcttgctcgtgaagacgaacgcagggtcgaacgccatcagaatcttgttgccgtaatcgtagatgccgttgttcacggcgaccaagtcgcgattgcggcagcgctccacgcgagggcaaatcgcgcgaagggcctcgatggtctcgtttacgtccttgatggtgcccgtcttgcaatagccgcggataaggctcttcagattctgctcgccaacgtcgtagcagccctcgttgtcgccgctgtactggtaaatgccgatgtcaaagttgccgtcgtcatgcgagttgttccaaaggatgcccaccgcatggtgcagcttgtacaggatgacggcaatctgcaaggtatggagacccgacaggcgcttgtagcgctccgcgccctccttcttgtcgggataggcgtccttcagcttcgcaccgggacccgcattcgggtcgcgcttgccaaagttgtacgcgtcgatacaacggttcgtcagcgtcagaagctcgaacttgagcgtatcgcgaaagggcgggtcctcggggtctttgtcctgcaggtagaacagcgtcgcatactccagcaaatcgtcgtacgcgatagtctgctcggaacagaacgacacgatgtccaccgcacactcatcgggaagaaagaggcccgtcaattcctcttgaatatcagacgcatccgtgctaaaatctttatatattgagttggccgtcccggaagctgcgcaggcatcggggcggttttcttttacctccatgttctcatctccttaattcgtcagctcgacgtgcttcacgttctcgttcttccacgcctcaaggtcatccatctcatagcgaaccgtgctaccgaccttgtaataattcggccccttgccctgagaacgccagacgcggagcgtgcctgcggtaaaaccgaggaaatccgccgcctcatacgtcgtcatataagaggggtttacctcttttacctgcttctttcctttagccataaccagccacctccatgttcaaagtccttttcgcgaaacaaaaaaagctcccgtggaaaccgaagagggacagaggcgcaaagccttgtctatctcggtttccacgggagcttcgtgttcgttgtttcgcccgtgacgcacggcctattcgaccgagcgctcggctcctattcccgatagcaaccccgcatcgaggacgggacgggtgctgagccatttatctatacagcttttattatacggcgttaacactaacttcgcaacacttattatttcgttacccctgctcagagcctatttccgctcgtttatgggcagaaatcaattcaaaaaagttcgctcgcgccccctgaaaaagtcggaggcagaagaagtacgccaaggaaagagggtgccattccgacgtgcgctgcacaccttcggcacgccatgcacacttcgctgcacaccatttttcattgaagtgtgcaggcgatttttcttgttttctctcgtttatgagccttttccgatgctgtctcgccgccctgcacgccatgcacaccattttttcaatgactatatatacgtgagggaatttatatattttcatatataagacttataaaatggtgtgcatagtgtgcagtacccctaaatcccctgataaatcaagatttaagctgcacactatggccaaaaatggtgtgcaggatagtgtgcatggtgtgcagggtagtgtgcacgaacgacggaacgcgcaaatcggcataacctcccaagcccatgccgcatcccttctgtacgtccgcccacatccgactgccgcccgcagggcggccacccttgcatcgagcgaacgcgagatgcacatgggcgctcgaacgtcctcagaccgcttcagaggcgttttaaggcacgaaaaagcccgaggggtacacgagtaccccaacgggcttaaaacgggcttaaatcgcaaattacggcgtttcgtggcaacgaaaacggaaaggggacgccatcaggcgtccctcaacctatacacaagcgcaaactcattcttgtaaaagaagagttcgacgcttcctcttttggtggagctgcggggaattgaaccccggtccgatgaccgaaccctcagtcttctacgtgcgtagtctgctggccatatggcggtttttctgcccccatcgatgtcgcagacaactgatggcgggcatatccgcagttaaagtccccgaatcaccctgtggctcaatgattcaggcgagtcttctaaacgacgctcagcatccccccgaagacgagagggagtgaacggagcggctgctcactgtttaaccctggcgcgaagctcaggcagcgagagcgaactcagtgcggttagatttagcacttattcttttgcaggggacatccacgagcggaccctgcgttctcggcacgcttccctgcgacgaacaggtcaccgtcgaaaccgatcagccccgatattgaattatcaattcgcattccggttcatggccggacatttcattatatctcggctgctcgaaaaagcaagtcggtcatcagtcggtcacccatacgcgcttggtgccggtctggacgcgcttggttcccgtccgcacctttttcgtgccggactttatgctctgcacctgatacgagccgtgatcctcctgccgggtcccggcctggatctgcttgtcctgccagaccttttcgtaccggtagttgtcggggaggccggacttgagcaggtagtcaccgtgctcctcgaacgcggggtcgttcgcgttcgcagtgaacccgtcgtgttcaaagatggcgcgtccgggtggcacctgcacccgttgcgtctcatagaccggccgggtctcccagcgcccggaggggccgccgttcgggccgctcctgtcgggctgtgcagtggaatcgagctgcgcggatttgccgtcggcattgtcggcatcggtgccgtccttacggatattgtccccggttgcttcgttcttgccgccggggccggacgcccccccctcggtttccggagaggttccctgttctccggaggcgacggtgccggccggcttcggtggacgcgtcataatcgcgtgttcgttcgcgcttatggggttaggggggtatatgccgtggtatgcccagttcggatgcggtggcggtgggtgcgatagaatccgatacatgaaagtggtattgcagcgtgtgtcgcaggcgtcggtcgatgtcgtcaatgagctgggggatttggatcccacgttcgatcttcagcagatcggtccggggttcctgctgctggtcggcgtgaccgatgaggacggcgatgacgagatcgcatggctggcgcataagattctgcgtctgcgcgtgttcgaggacgagcagggcaagatgaaccggtcgatccaggacatcggcggtgagatcctgtccgtgtcgcagttcacgctgttcgccgacgtgcgcaaggggaaccggccgagcttcgtcggtgcgggcaagccggaacatgccgacatcatgtggatcaaattcaacgaggcgctgcgctccgggggtgttgcagtgcgcgaggggcgtttcggcgcccatatgcgcgtcggcctggtcaacgacggcccggtcacgatcgtcatcgacaccgccgaccgccattgaccggtcgggccgcggctgcgccgtcaccgtgcgagggtaccgtcactgtgcgatccctcactgcgtgacgcataacccgcacagcgtgacggttctccagtgtgacggcgtcccgcgtgacggtgcccgtgacgcaacccgtgcaacccgcgcggagtattgccgtgtccgtgtcggttctcgaatatgcgaaaacccgcccgaccggctgccggtcgtaaccggtcagtcaatcgggcgggctttgcggggcggtcagtcagcgccgaagcgccttgaccctatcaggcttccacgggtttcttgccgctttcgagcaccttgtaggcgaagccgacgacgagtacgtagaggcagccgatggccatcacgaggatgccgccgaactgacccgcgacgtcggccgcggcacccatgatgggcgggaagatcgcgccgccgatcaggcccatgagcatcaggccggagatctcgttctgacggtccggacggtacatgagcgcgtgggagaggaacagcgagaacacgttcgagttgccgaagccgacgagtgcgaccgcaacccagaacagccagaccggcggattggtcggcacgagcgtgaagatcgcaaagcagatggcggagagcgtcatgatgacgccgcagatgcgcacgccgagcttgttgctgatcttctggagcacgatgccgccggtgaagcagccgatcatgcgggcgacgaagtacaccatcgtcgcggaggacgcgatggctgtgaacgtgtcgccggtgtgctcggtcaggatgcgcggcgcctgcgcgttgatggcgacgtccacgcccacgtgcgccacgatgccgaggaagcacaggagcacgatgcggtcggagaacagcagcttgaagcagcggccgatggtagtggtgccggcgtcaggcgcgggctcctcgatcttgtcgaacgcgagcagcacgtagccgaggatgccgacgatgaagtagatcacgaacagtatccaccacatgccgacctgcttgccgtcagcgttggtgtaggtgaaggcggagatgctgttcgcgccccacatggcgatccacggggcgaacagggaggcgaacgccttgacgaactggccgagggtcagcgtggaggcgagcttatcacccttgacgaacacggtcagcagcgggttgagcgacacctgcatcagtgtgttgccgatgccgaggaacgcgaaggagatgacgatgagcaccagctgcacggtggacttcatcgggcacagcaggtaggcgatgatcggcagcgccatggcgacgagcgtcaccaggatggaccacagcacggtcttgcgccgcccgatcttgttcatcaggatgccggtgggcacggagaagatcaggaaccagaagaacaccatggtggtgaacaggttggcggttccgtcggcgagaccgaactcggccttcacgtagttcgtcgcggtgccgaccaggtcgacgaagcccatgacgaagaaggcgaacatgacaggcaggatcttggcgaatcccgcgttgactggcttggtggtttcgttgctcattgcgatgtttcccttttctctgataatgagctgtgattatttgatcgtcggtgcatcctgtgggcgtgtcactgcgcggcctgcgcgaggtagtcgggcatggtgtccgggtactccggccaggcgccgttggcggtgcagacgtacgcggcggtgttcacggccttgcggtgcgcctcggccagcgtgtcgccgagcagcgtacgggcggtgaacgtgcctgagaaggagtcgccggcgccgacggtgtcgacgacctcgacgtgcggggtggccagcgtggaggactcgccgttcttggagatgatggtggagaacgtggaaccgccggtcaggataacgtagtcgaggccgtactcgctcatgaaccagcggcaggcgtcgtcgtcggaggtgccgcggatgtcgaacatgtcgcgcaggagcagcagttcggcgtcgttgatcttgaagacggtcgccgcttcaagcagctcctcgatgagctccttggagtagtggtcaccgcgcaggttgatgtcgaagaacttcattgcgcccggcttggtgtgcttgagcagctcgatgatggtgtcgtgggtctcgggggagcgcagggccagcgtgccgtagcagatggcgtcggcctgctccacgacctcgatgagctggcgggtgagcagcagatggtcccaggcgacgcccttgacgatggtgtactccgggatgccgttcttcaagctgacctcgacagtggaggtgggccatgcgttgcgctggatgatggagtggatgccggccttctcggcttcggcgagcagctcgtcgccgagcgcatcctcgccgaccgcgctgattgaccagccgtcggcgccgttcatcttcgcgtggtaggcgaagttgacgggggcgccgcctgcgcgctttccgctgggcagcatgtcccacaggagctctccgagagacagaacgatgggcttggtcatgatggtttcctttccgggatggttgctgtggttgttgtgttgttgtgttgctgcggggtcctccgttgtggggaccccggaaatccgtgatgttccgcgggcggtcacgacagttcgaagaactgtgacgggtggtcgaggaactggttgatggctacggccgcggcgccgttcagggcggcgtccgcgggcagggcggacagggtgatggcggtggtgtcgttgagctcgtggatgacgtgcttgtcgatgaccttgtgcacttcgtcgagcaagagctgcccggcttcggcgacgatgtcgccgatgacgatctgcgaggggttgaaggagttgaagatcgtgatgcagccgaaaccgacgtaccgtgcgacccgcttgatcagtgcgatcgcgcgcttgtcgccgccgcgggccagtgcgaacagcgctcggcatgcctgcaggtgggtcatcgtgccggcatcggcgatcagatcgccttccttcaggatcatctcgtggatcgcgggggtggagcagtagcgttcgaggcatccgacgttgccgcagtcgcacggcttgccgttgatatcgatgctgacatggccgatttcggtggccgctccgagggcgccgttgatgatgttgccgtggtcgatcacgccgaggccgacgccttcgccgacgaggtagtaggcgaggttctcggtggtgatggtgggatcgaacaggtattgggccatcgcgccggcgcgggcgtcttgctccacgaacacggggacggtgaacgcgttgctgaattcgtggatgaagttgactttctgccatccgcgcatcgaggacacgacggcggtgcgtcccacgttgcgcaggtaggggccggggacggccatgccgatggcgatgatgcgtcggtcggcttcgatcagcgaaccgatggtgtcgtggagctgcatgatcgccgagtcgatggtgtcttcggtgacttggggcagttcctgcacggtcagcggtttgccggcgaggtcgaacacgccgagctgtaccaggcttcgcgcgaatttcacggcgatgacgtggaattctgcggtgtcgagagtgagcccgatggagcggcggttcttgcgcccctcgaaatcgccggtctccttgatggcgccggcttctatgagcttggcggtgatcttggtgatggcggcgggggtgaggtcgagggctttggcgatctgcgcgcgagagctgatgccgtgctggtacaggtgctgcatgatccgcgaacggttggtttcggacactgatgccagggttgcgttggcgatggtgttggtcatcactgctccttcgctgtcgtgccgtgtgcgcggtcgttgcgtgttgttgtcatgctcgtcattgaatatgaacgatgtttatatattaacactgttaatcaaaaaaagggaggcgcgccgttgttcggcgtgtcgcgctttgtcccacggtttgcgcgtgtcggggcgtgggatggttcgggtgccctcgtgcgggatggtacggtgatagacaaggtatgtgacgcatcgaaggagatgacaatgacggttgaaatcgcggtgcaggacgtggagggcgcccgcatcgcacatgaggagggggcggatcgcgtcgaactgtgcgccgctctgatgggcacgggcgggctgaccccaagcttcggcatgatccaggcatgctcccatgtcggcgtaccccaaggcatccaggtgctgatccgtccgagaggcggttcgttcgtgttcaccgatgaagagaaaaacgtgcagatcgccgacgtccgttcggccatcctcgccggggcgtccggcgtcgtcgtcggaggcatgaccgaggacgggcgcattgacgtgccgttcacccgcgcgctggccgaggccgcccgcaacgaggccgtgcgctgcaatcgcaaggtgcaggtcacgtatcaccgtgcgttcgacatgctcgacgatcagttcgccgcgctggataccctgatcgaacttggcttcacccgcgtgctcacctcgggtggcgccgcatgcgtcccggatggtctgggccgcctgcgggagctgtccgaatacgccgcggggcgcatccagatacaggccggcggcggtgtgaccgtcgatctcattcccgccttgaaggagacgggcgtgtcggcgattcatttgtcggcgaaacgcacgatgacatcggatgggggccccggaggcggaggcgatggcgtcatggtatgccgcaccgatcgggatgtcgtgcgtgccgcagtcgccgccgcgcgctgaaaatccaaatcctcccgctggcgggaggtggcgcgcagcctgatcagcggttttccaggtaatcgtggaggactgatagggcttcgccacgcagggtgatttcgccctcgcactcgcatcggcggatgatggtccgcgtgtggaacgacgagccggtcagcaggtcgagctgcgcctgcgcggccgacagcagggtgtcgttgacgatgtcgctctgcccgtacacgcacacgtcggcaaggtccagtagtcccacgggcatggacagcgccgtgcccagataggtgccggcctcgcgcaggatgctcgcgcgcatccgttcgtcgctgcgctgcagccgtgcgtgcagagaggtcgccgagaccaggcgttcgaggcaccctcgcttgccgcaggcgcacggagggccctgcgggtcgagggagatgtggccgatctcgccgccggcgtggttctcgccgaacaccggcacgtcgcccagcagcacggcacctccgacgccacggcgcaggcggacgaacatcatattggggccgcccttgccgaacagtcgctcggtgaacatggcggcggtcgcgtcgttgttcacggtgacgggaagtgagaaacgccgttcgatgggcgtgcggacgtcgacgttgcgccagccgagcagcgtggagcgcttcaccaggccgttgccgtcgaccacgccgggcatggcgagcccgatgccgatgacgttctgcgtggcggcgtgcaggggagtgatgacctcgttgatggtgtcgaaatccacatggttcaccgcccgcagcgcgtgttccacgtgcatgaccggctcgccgagcaggttcgtggcctcgccctggatgagatgcggctgtgacaggtcgatgctgatgatatgcagcgtgtcggggtcgacgctcagcagcgtgcctcgcttgcccttgccgccgttggactcgcggccgttctcgcgcagcaggtgacagctgagcatgctgttgaccacatcggagaccgccacgcgggacagtcccgtgcgccgccccaattcggcgcgtgaaagctggacgtcggggaacagcaggctgaagatcaatgaccggttcgtgcgtcttgcatcggcgggacttgccttgccgctctgtcccgggttgtgggggccccatatcccggattgctggtaagcggtcataagtccctggatcctttccgtggctctccgcgagaccatttccggtcacgcaatgttcattctacggtcgctcatgttcaatgtccgttgtgtcgccgaagatgcggatatacacattagttagtatcattaacaaatagcggatgcgcatgtcacgggaaacgcaagaatcgcgtgacggcacggctggtcgctgatgacaacggggtggccgaaccgctgaagaatgaacaacacaaggaggttgcacatgcctgaagtgattatcgtgaaggatcaggatgaggccggcgagctgtacgcccgctgcgtcgccgatctgatcaagggcaagccggacgcggtgctgggtctggcgaccggttcgagcccgctggccgcctaccgtcacctcgccgccatggtgaaggccgaggacatcgacgtgtcgaaggtgcgcggtttcgcgcttgacgagtacatcggtctgccgctgacccatccggagtcctaccacagcaccatccaccgcaccgtcgtcgagccgctcggcctcgacccggagaaggtgcacgtgcccggtgacgtgctcgacggcgccccgctggaggacggcgagcgtatcgcccacgccggccccgagtacgatgcggccatcgaggccgccggcggcatcgacgtgcaaatcctcggcatcggcaccgacggccacgtcggcttcaacgagcccggctcgtcgctggcctccggcacgcgcgtcaagacgctggccgagcagacccgcgtcgacaacgcccgcttcttcgacgacgacatcaaccaggtgccgacccactgcatcacgcagggcatcggcacgatcctcaaggcccgtcacctggtgctgctggccttcggcgagggcaaggccgaagcggtcgaggagacctgcgagggcggcgtgagcgccttctgcccggcttccgctctgcagctgcacccgcacgcgacgatcatcgtcgacgaggccgccgcctcccgcctgcgccacaaggactactacaagtacgccttcgagcacaagccggcctggcagggcatctgatcagcgccctgacaggcatatcgatatgcgctcccgaaccggggcgcatgacggatgggttccccgtctgggggacccatcctcgcatggggcggtcatcatcgcgccccgaatcacatacaaagaggtaggacaatatgactcaatcacgagaacagatcgtcgcgcgggtgactgatgcgctgaagggcgaggcgggtcgcgtcgccgttcgcggtgcccgcaaggtggatgcgtgcggcgtccaggatcatttctggctgaccgcggcggacggtgtcatcgtcgccaccggcaccgacgacgaggcgttcgagtcggcgtgtcgttccatcggccttgatccggccgacgagacggccatcatcgatgcggccgggcagctgatcaccccgggctatgtggacattcacgcgcatggcgcatgggagcattccttcgatgacggtccggaaggcatcgacatcgcgcgtgccggccacgccgtgcacggcacgaccaggcaggtgctgtcgctgatcaccaatcccatcgacgtgatctgcgcgaacctgaagaacgttcgcgccaagatggacgagcgccccgacgtgctcggcgcccatctcgaaggtccgttcctggcgctcgcccgcaagggcgctcatgatcccgagtgcctcaaggacccggttcccgagctcgtcgacgagctgctgggcgctgccgacggctgcatccgccagatcaccatcgcgcccgagctgcctcacggcatcagcgccatcaagcagttcacgaaggcgggcgtcgtgccggccgtcggccactgcgacgccgattacgagaccgccaaggccggtttcgacgccggcgcgggcatcatgacccacatgttcaacgcgatgaatggactgcaccaccgcaagccgggcccgatcccggcggccgtggaggatccgcgcgtcactatcgagctgatcaacgacggcttccacgtgcaggacccgatggtcaagctgggcttcgagttcgcaccccaccgcacggcgttcgtcaccgacgcgatggcggccaccgactgccctgacggcccgtacaagctgggtgcgctggacgtgaacgtcgtcgacggccacgcccgtctggtgtcgaacggtgccatcgccggctccacgctgctgcttgaggtcgccgtgcagcgcgccgtcaatgagctgggcatctccccggtcgacgccgtcgaggctgccacgctggcgcccgcgcgcgcgttcggctacgacaagccgaacgcggtcaccggcgctccgctgggtctgctcgcgcccgggtacgccgccgacctgttgctcaccgatccgtccagctggacggtcaaccaggtgtggtgcgccggccgcaagctgaagtaaggcgcagccgcaaggcgttgattgcattcgtcacgggaaactgtgataggtcgcgatgagggccgtctgcatatgcaggcggccctcatctcatgtacagccttgtcgcccccacctcttccggtctcataatgtgggcattgtgtggcggatgtcgcaaaataccggaatagttgcaattccaagggttattcggccacaagccgcacccttgcacatcacagccgattcgtatggaaacacatggctaacacaataaccccatagtcttggtgaccgtgccaatgaagacggcgcggagagtagttaaggaagaggtatttcccttgaagaatcatcgcaagattttggcggctgtcgcatccatcgcggcaatcgcatcgctgaccgcatgcggcggcgtgaaggacgccaatacggcgagcggatccgcgatcaccatcggcaccaccgataagatcaccagcgtggatcccgcgggctcttacgacaatggttcgtatgccgtgcagattcagattttcccgttcctgtatgcacaggattacaatacgtccgaattgagcccggatatcgccgccgatgacggtacatggaatgatgacggcaccgaattcaccgtaaagatcaaggaagggctgaagttcgcgaacggtcatgacctgaccgcatccgatgtcaagttctcgtatgaccgcatcaagacgatcaacgacgcgaacggcccgagctcgctgctcgccaacgtcgaatccgtcgaggctccggacgataccaccgtcgtgttcaaggactccgtgccgttcgatgtgacgctcaagcaggtcatgtccagcccggccggacccatcgtcgacgaagaggtcttcgacgccgacaagctgaccgacgccgacaccatcgtcaaggggaacgcgttcgccggcccgtacaagctcaccgcgttcaagatgaacgagaccgcgtcctacgagaagaacgacagctacaagggcctgaccccggccaagaacgacgccatccaggtcaagtacttcgccgacgcgtccaacctcaagctcaacgtccagcagggccagatcgacgtggccttccgctcgctgaccccgaccgacatcgaggacctgtccaaggactccaaggtcaaggtcgtcaaggggccgggcggtgaggaacgcttcctgaccttcaacttcaagatccagccctacggcgagtcccagtccgacgccgacgccaacaaggccaaggccgtgcgccaggccgtcgccaacctcatcgaccgcgatgagctgagcaagaaggtctacaagggcacctacaccccgatgtactccttcatccccgacggactgtccggccatgacgacacgctgaaggccgcctatggcgacggtgagggcaagcccgacgccgccaaggccaagaaggtgctggaggacgccggcgtttcgaccccggtcgacctcaagctccagtacaacggcgaccactacggctcctcgtccgccgacgagtacgccgccatcaagtcccagctggaggccgacggcctgttcaaggtcgacctgcagcagaccgaatggacgcagtacaacaaggaacgcgtcgtcaccgaagactccgacggctcgtacccggtctaccagctcggctggttcccggactactccgatccggacaactacctgtccccgttcttccgcgacggcaacttcgtcaacaacggctactccaacaaggaagtcaacgatctgatcgtcaagcaggcaggcgagaaggacgccaccaagcgtgaggagatcctcaagcaggtccaggccctggagaccgaggacctgtccaccatcccgctgctgcagggtgcccaggtggccgtcaccggaacgaacatcaagggtgtcgtactcgacgcctcgttccgcttccgctacgcatcagtgaccaagtcctgatccagtcccggctcccgccgacgcggggcgacgcccgtgaagccggtcatggatggtgcagttgacgccaagccatccatgaccgccgcgggcgatcccacacgccgcgggagcatcatccgtattcgatcgtttttccccagaaggagcatcgcgtgtccgaaagcgccacggcgtcggcacctgcgaagacgcagccgaaagccaagaaaaaccgtttgtccagtgggtttttccgtttcgtattgaccagattcctgctgatcatccccactgtattcattctcgtcaccatcgtgtttttcgtgatgcgtgccaccggcgacccgatttccgccgccatgggcggacgcctgactcccgaagagctgcaacgccgtatccatgccgccggctatgaccgtccgctggtcgtgcagtacctcgactatcttggcgggctgctgcgcggcgatctgggcaccacgctcaccgacaaccagccggtcaccaccatcctgacccgctacggggcggccacgttcgagctcgcgttcctgagcctgatcgtcgctctgatcgtcggcatcggactgggccgtctcgccgccaggcgccgcgaccacgccgccgatgcgggcatccgcgtgttcgccatcctgtgctatgcgacgccggtgttcttcctgggactgatgctcaagctcgtcttcgcggtgtggctcaacgtgctgcccccatccggtcgttccagcttcgccagcgacatgcaattccagaggctggtgtcgcccacgggcttctacatcatcgacgccttccagctgggtgacatgagcgtgctggtcgatgtgctgcgtcacgcggtgctgcccgccctcgcgctgggtctgctgaccgcaggcgtgttcatccgtctggtgcgcaccaacgtcatctccacgtacacgtccggctacgtcgaggcggcgcgctcccgcggcgtgtcggagggccgtctgctgtccaagcacgcctggcgccccgcaatgatcccgatcatcacggtcatgggcatgcagatcgcgctgatgctcgccggcgcggtgctgaccgagaccaccttcgagtggaagggtctgggattcatgctgtcccagtacctcaagcagcgtgacttcgtcgccgtgcagggcatcgtgatcctaatcgccatcatcgtcgccgtggtcaacttcatcgttgacgtgatcagcgcgctcatcgatccgagagtgaggtactgacatgaccgaaagcactgcaaccaaagtcggcgtgcccggcgataagcggctcggcgacctcaaggtcaacaagccggtgccatggtacggcaagctgccggtggtgcgcgacctgaagatcgcggtcggctggcagaaagccatgctggtcacgggccttgtcatcaccggcgtgttcctgctcgtggcggtcttcgccccgctgattgcgccttacggatactcgcagatcaaggacgcggacggcgtgtcgttcccgacgcaggccgccccctcgtccaagcacatctggggcaccaccgtcggcggattcgacgtgttcagccgcacggtgtggggagcgaggaccgcggtcatcgccatcatcgtcgccgtgctgctgtcgatcttcgccggcgtgctgctcggcctcatctccggatatttcggcggatgggtcgaccgcgtgctggtcgtgatcgccgacgccatctactcgttcccgtcgctgctgctcgccatcctgatggccatcatgatctccggcggccagtccggcctgtggagcggcatcctggcatcaggcatctccatcaccgtggtgtacatcccgcagtacttccgcaccatccgcgccgaagtggtgcgcatcaaagggtcggcctacgtcgagtcggcgaaggtcgtgggcgcctccacatggcgcatcatgaccaagcacctgctgaagaactcgacgcgcacgctgcccgtcatccttacgctcaactcgtccgaggcgattctgacgctcgccggactgggcttcctcggcttcggcatcgagccgacggccgcggccgaatgggggtatgacctgaaccgttccgtcgccgacgttacggccggcatctggtggacggccgtgttccccggcatcgccatcgtgctgatcgtgctgggcatcacattggtgggcgaatcgctcaacgatctggcggatccgcgtcttcgtgcccgcaagtccgccggcgaggtcatcggatccatcgaagacacgtccgtcgaccccagtgagaagccgagcgccgacaacgaggtgatcgcggagctcaaatccgaaggcaagccccaggtcagtgtggagaaccctgccatcgcgcaggtgatggaaaaggagaccgaccatgagtgactcgaccaacgtcaaggacacgtccggcaatctagccgaaatcgagaacctcagcgtctcgttcatgaccgatgcgggctccatcaaggccatcgacaaggtgaacttcaccatcccgcgcaagaccgtggtcggcgtggtcggcgaatccggctccggcaagtcggtgaccgcccgttcgatcatcaagctgctgcccgagaccgccaccacgtccggtgcgatctacctgtcgaaccgtgccgactccgaatgtcttgacgtgctgagcctgtccggtgaggatctgcgccgcatgcgcggctccgaagcggccatggtgttccaggagcccaactcggtgctcaacccggtgtacaccatcggctggcagatcgaggagggcctgcgtgcccacggcatgaaagacaagaaggagcgccgggcgaaggccatcgacatcctcaagaaggtcggcatccccgaggccgagacccgcatcgactactatccccaccagttctccggcggccagaagcagcgcatcgtcatcgcgatggcgctggtgctcaaccccgggctgatcctcgccgacgagccgaccaccgcgctcgacgtgaccgtgcaggccgaaatcctcgacctgctgcgtctcgcccgcgacgagttcgacgcctccgtgctgatcatcacgcacaacatgggcgtcatcgccgacatcgccgaccaggtggtcgtgatgtaccgcggccatgtcgtcgagcagggcgatgtggaaagcatcttctaccatcccagccatccctacacccagcgcctgctggctgcggtgccgcgcatcggccagaagctggtcgtgcgcgatgtcgacggcaagccgatcgaccgcacgtcggattggcatgacgagccactggccgtcgaggcgaagggactgacgatcacgtaccccgggcacctgatgcagcccgacttcgtggccgtagacggcatcgacttcgcgatccaccgttccgaagtgctcggtctggtgggggagtccggttccgggaaatccaccaccggccgcgcgatagccggcctgcagaaagtgagcggaggctcgctcaatgtgctcggcgtcgagatgaacggcgtcagggagcgtgatttcaagcccaagcgtgccgacatcggattcgtgttccaggatccgggcagctcgttcaacccgctgatgaccatcgcggagaacgtcgccgaaccgctcatcgtgcaccgcaagtactcgtcggtcgctgacgcgaaggagtacgtgggcgacctgctggagatggtgcagctgccgagggcgtacatgagccgattcccgcacgagctgtcgggtggccagcggcaacgcgcctcgctggcacgcgcgctggcgctcaagccgtcgctgctgatcgccgacgagccgacgagcgcgctcgacgtgtcggtgcaggccaaggtccttgaactgttcaagaagctgcaggttgagatcggattcgcctgcctgttcatcacccacgatctggccgtggtggacatgctcgccgaccgtatcatggtcatgcacaagggacgcatcgtcgagcacggcgacgccgacgacatcatgcagcggccgagcaaccagtacacgaagaaactgctcgcctcgctgccggttcccgacccgcgcgaacagcagaagcaccgcgcccacctgcacgagcttctggccgccgaaaacgcggcctagccgctagccccagcaggattaccggttccgccccgctggcgggaggatacatatcgactccgcgcgaacgtcgtatgggcgggcgtggtgcgactagtatagggaaggaattgtcagtcggttttcgaacgacacatgttttcgaacagtacgaaggagcgtcacacgatgagcgaagtcatcaccgagaaggacaaggaatacgaggcccgcgaggaggcgaacgcccccggcgcggatcaggcgatgagcgaccgtgtgaacaaccgttcgctgcgtcccaattccagcgccttcattgatttcatgaagaccggttgggacgccagcgaaccggagatcgagccgctcgaatcctcgaagttcacgccggcgcgactcgccgcactgggcaaggcgttcccaggcgagcgtctggtgattccggcaggcagtcccaaggtgcgcaacaacgactgcgattacatgttccgcccggacaccaccttcgcgtactacaccggcctcggccaggattacgaggcgggtgccgtgctggtgctcaaccctctcgacccggattcgcccgaggcgaaggccggcaagacgcatgaggccgagctgttcgtcgccccgcgcgccgacaccgccacgcaggacttcttcatgaacgcccattacggcgaatactgggtgggtcctcgtgccggtctcaaggaaatgaccgcgatgaccggcatcgagacgcacgacatcgcccagctggctgacgcgctgtccaaggacgtcggggccgaggccggtgcggtgcgcgtgcgcgtgatcagcgacgccgacccgcaggtcacgtcactggtcgaatcgatccgtgaggccaacggctatgccgacccggacaagaacaacgcagccgacgacaagctgcacgagttcgccgccgaagcccgcatggtcaaggacgagtacgagatcggagagatgcgcaaggccgtccaggccaccaagcacggcttcgaccacatccttgcgaagcttcccgaagcgctcgacaagccgcgctccgagcgcatcctcgaaggcgcgttcaacgcggtggcccgcgaggagggcaacgcgctgggctacgatacgatcatcgcctccggcgagcacgcgccgattctgcactggatgcgcaacacgggcgtcgtgcgcaagggcgacatgctgctcatcgatgccggtgtggaggtcaacagcctgtacacggccgacatcacccgcacgttcccgaccaatggcaagttcaccgatttccagcgccggctctaccaggcggtgctggactcccagcaggccggcttcgaggccgccaagccgggtgccacgtactccgacatccatcacgcctgcatgcgcgtgatcgcgcagcgcctgcacgactgggggctgctgccggtggacgtcgaggaatcgctgtcgcccgaaggccagcagcaccgccgttggctcgcctgcggcgtggcgcaccacctcgggcttgacgtgcacgattgcgcacaggcccgctacgagtcgtaccaaggcgcgaagatcgagcctggcatgatcttcaccatcgagcccggcctgtacttccgcgaggacgacctgctgattccgccggaataccgcggtatcggcatccgcatcgaggacgacgtgctgatgaccgagaacggccccgaatggatttccgcgggcatcccgaagcggcccgacgacgtcgagcagtggatggccgacatggccgcaggctccaaggcctgattgttccgatacgatgccgcccctttcaacggggcggcatcgtcggttgtacgcaatacaaggaggaatgcccatgccaacacccgaattcgtattggagttgcgcaagaagatcggccatgacctgttgtggctcaacggggtcaccggctgcgtgctggacgaccggggccgcctgctgctgggccgtcgctccgacaccggcgagtgggccatggtctatggcatcaacgagcccggtgagcagccggcggatacggtggtgcgcgagatcagggaggagaccggcatcgacgcggtcgtcacagatctggtcgccgtcacgtcgtcgtcacgcgtgatcacctatgcgaacggcgacaatacgatgtacatggaccactcgttcctgtgcgctctcaagcccggcggcaatgccgagccgtatgtgggggacgaggaaagcctgaacgtgggctggttcgaactggatgatctgcccgagcccctggccgccagcactgtggagcggctgaagctgttccggcgctatctcgacaacaagcgccggggtgacgcccacgcgctgttcgtcgccgacggggtgcagcgctagcggcgggtctgtttgcgtctctaagtgcgcgccgaaacgacaagtgcgcgaacatagggacgcaaaccaggccatttgcgtccctaagtgcgcacggttgtcgtttcggcgcgcacttaaggacgcaaacgagcgctacacggtcgtcataggggctgaccggtgtgacgtgccgtccgtctcactcgtcttccatgtcggcgagctcatgcgccgggcaggcaagcgcaagcacggccgtggtcgctatgaacgcgacgccactgaggatgattgcccgcatgatccatctcctatcgcgtggtcttctcatcggagagccgaacctttccttatcaagtacagcaccatataagagctcgtttcatgggttaggtcatacgaacggtcaatttttggtgacgacttcgtgaattacgccgtcatcgtgcctgcgattggcgtcgcaatgacgcggcggcgacctgctgaccggatattgccgtcggcatatgacaggacgaccattagaatggcgtaacggaaccattgacgagcaaacgaggtcgatatcagcatgtcttttgagcatccgaaccgcaacaacgagtccatccgcgacgtggagcgcgacatcatgcgccgcccgccggagcacaacaccacgaatctggatctggaccggatgaacctcatgctcgacgtgctcggccatccggagcactcgttccgtgtgatccacgtcaccggcacgaacggcaaggggtcgaccgcccgcatggccgaggccctctgccgggcgtatgggctgcgcaccggcctgtatacgtcgccgcatctggaacgtatcaacgagcgcatcgccatcgacgggcaggagctgagcgatgacgatttcgtggacatgtgggatcagatcaaggatctggtcgccatcgtcgacgcgaagatggccgagtccggccgtcccccgatgagcttcttcgaggtgctgacgtcgatggccatctggaagttcgccgacgcgccggtcgacgttgccgtcgtcgaggtcggcatgggcggcctgtgggacgcgacgaacgtgctggacgcggacgcggccatcatcggcccggtcgacatggatcacatgcagtggcttggcgacaccgtcgagcagatcgccaccgagaaggccggtatcatcaagccgaactgcaccgccatcatcgggccgcagccgcatgaggagcgggtcatgccgattctgatggaggccgccgagcgcaaccatgcgacgctggtacgcgacggctatgagatggaggtcacggaccgcgtgcctgcggtcggcggccagatcgccacgctgcacacgccgaacggggtgtacgagcaggtgccgatcgccaagttcggcgagcatcaggcacacaacgcgctcgccgcgctcgcggccgcggaggcggtcatcccggtcaacgggccgttgaacggcgacctggtcgggcaggcgctgcagggcgtcaaggtgcccggccgcatagagcagatccgcacgtcgccgacgatcatccttgacggcggacacaacgtgaacgcggccgaggcgctgcgcaaggccatcgaggaaagctacgacttcacacagctggtcggcgtcgtcgcgatgatgggcgacaagcaggtggaggagtatctcggcgtgctggagccgatcctgagccaggtcgtcgtcaccgagaactcgtggcgcgaccgcgtcatgccggccgaggaactggagaagatcgccgtccaggtgttcggccgcgaccgtgtcatccgcgaggacagcctgccagacgccatccagaaagcggtcgacatggtggacgtcgaggatgagaccggagtcggctacggccgtggcgtgctggtctgcggcagtttcgtcaccgccggagacgcgcgtacgctgctcaaggagcggatgaacgccgacctcgccaagccgaaggccgagcgtgtcaatccctcggtgggcgagcccgagccgcgcaccggcaccggcgaccctgcacggtccggggtggaatcggacgccgacgcggacttcgccaccgacgcgaaccccgatttcaacgagaacgacttcggcgatttcggctttgacaaggccgccaaggaggccgccaaggaggcggatgccgccgacggcggtcccaagggcggacaggcctagtcgacatgtatctcaaggaactcacgctgcgcggcttcaaatcgttcgcatccgccacgacgctgcgattcgagccgggcatcaccgcggtcgtcggtccgaacggttccggcaagtcgaacatcgtcgacgcgctcacctgggtgatgggtgaacagggcgcgaagaacctgcgcggcacgtcgatggaggacgtgatcttcgcgggaacgtcctcccgcccgccactcggccgcgcacaggtgagcctgacgatcgacaacaccgaccacacgctgaacatcgactacagcgaggtgacgatcagccgcaccatcttccgcaacgggggttccgaatacgcgatcaacggctcggcctgccgtctgctcgacatccaggagctgttgagcgacaccgggctcgggcagcagatgcacgtgatcgtcgggcaggggcggctggacgcgattctgagggccgatcccagcggccaccgcgcgttcatcgaagaggctgcgggcatcctcaagcaccgcaagcgcaaggaacgtgcgctgcgcaagttggcgaacaccgaaacgaacctgtcgcggctcgacgacctgctgagcgagatacgacggcagctcgggccgcttggccggcaggcgcgtatctcgcgcagggccgacagcatccaggtgacgttgcgcgatgcgcagagccgcctgtacgccgacgatgccgtcgccgcgatggcgaagcgcgacgcggtgcgcggcgagctggcttcggtgcgtcacgacctgcaggccgcgcaatcggagctcgcccgggtcaaggtgcgcatcgaacagatcgaatcgctgagcgcgcaatccagcccggcactcgcgcgaatcaaccagacctggcatgagatgtctcagatacaggaacggctgaaatcgttgtcctcactggccggcgaacgcggacggtcgctgctcgggcagctggtgacctctctcggcgaggaccccgacatgctgaacaagcgggcggaggaactggaatcgcaggcgcggcggcagtcggagacagtcaacgacatgcgcatcgcgctcgacaaggcgatacaggagcgcgccgacgacgagaaaaaactcgcctcggtgcgacagaccctggcggagctgcgcaaaagcgcccagcagcgcgacttgcagatcgcgaacctcaacgcgctgatcgcccgcgaggaggcggccgccgaacttgcagacacacgcgccaaggatttcaccgcgcagcgcgaaacactccagacccagttgtcgcaggcgcgctcgcagtgcgagtcgttggaacgcgaggccgacaacggcgacgatgacggcggcaaggcgctggaacaggcgcgggccgatctcgccaagcggcaggaggcgcttgacgacgcgctcgcgcggcaacgggacgtcgacggttcgatcatcacgctgcaggccaaagccgacgcgctgcgcgacacgctggaatcgcgcaacgcctccggcgctctcgaacaggacgatcaggtggccgcgatggggcggctcgccgatttcatccacgtcgaggaaggctgggaggaggccatcgcccacgcgctggacgcgttctcgggcgccatcgtggtgccgggggagcgcaacctcctgcatgcgctgcgcaaggcgaagcaggatcgtctgggcaaggccgtgctcgtgatgtccgatgtggctgaaagcggtgccggtgccccggaacaggtggccgccgctgaggagaacgatggttcgccatatcggacgccgtgtgcggccggcacgatggtgtcggcgaatccggatgcaccgaacccgggccgagccgcgggggtcgtcggcgcggtgcggctgctgctcaacgacgtcgtcgcggtcgagacgatggatgaggccgtgcggatggtccacgacggcggatgggcgcaggccatcacccgcgacggggaggtcgtcaatccggtgggtgccgtgggcggttcatcactgtcgcaaagcgacctgtccttggcagcgaggcgggataaggcgctgaagcggattacggtgctgcaagggcagctggacgacatcacgcggcaggttggcgaggcccgtcagcggcgggaccgggggcgagtgctggtcgacaaggaatcgcagcggcgcattcaggccaagctcaagtccgaacaggccgcgaaggcgttgcaatcggccgagtcgcggatgaagggcgtggaacgtcaggccgcggcgatcgaggagaagctgcgcggcagtgtcgaggaacgccggagccatcagttgaagctcgacgatttgcggcgggcgctcgccgcgatccgggattccggcgcggaacatgccgacgtcgacgagctgggggagcgcgagcatcggctggaagccgcgttgaacgctacccgcgagcatgaggtcaccgcgaagatcgcgtggacggaggcggaacgcaaggtcgagtcgttcaagcggcaggccgggctgttgcgcgacaacgccgcggaggccgcgcaacgacgcgtgcgcatcgaggccatgaacgagcgtcgcaaggcgcaggccgcgcacgcgcagcgcatcgccgacgatgccgcgcaggtcgcctccctggtggcggcgagcatcgacgatgtgatcgccaagcgcgaggcgctgcaggccgaggcatcgagccacgacgcggagctgaagacgctgcgggcgcagcgcgatggcatcgagccgaaggtcgcgggactgcagcggcgtgaacacgagctggatgtggatcgcgaacgattggccggggaattcgggcagttgacgcagaaggtgtcggatgacctgggactttccatcgacgagctcacccgcgatttcggccccgagcggccggtgcccgtgctggacgagaacgggcgtcccgtgccgcgtgcggacgcttctgaacctgaatccgagtccgaaccaggctccgaatctgacggaggcgacgacccgagccggttcgaaaccgttccgtatgaccgtgcggaacagcgcaagaggctggagaaggcgaagcgcgacctcgccgcgctcggcaaggtcaatccgttggccggcgaggaatacgacgcgcttgagacccgcaaccaatacctgaacgaccagcgcaacgacgtggtcaaatctcgcgatgatctgatgaagctcatcagggatctggattccacgatggtgagcgtgttcaaatccgcgttcgacgataccgccgccgcgttcgagaagatgttcgccacgctgttccccggcggtaccggccgtttgcgtctcgacgaccccgatgacctgcttgccacgggcgtcatcgtcgaggcgagcccggccggcaaacgtgtcaagcagctgagcctgctgtccggcggggagcggtccctgaccgcgctggcgctgctgttcgcgatcttcaccgcgcggccgagcccgttctacgtgatggacgaggtggaggccgcgctcgacgacgtgaacctgacccgccttatcaacgcgttcaacgaactgcgcgaacacgcccagctcatcatcatcacccaccagcagcgcacgatgtcgatcgccgacgcgctgtacggcatcacgatgcgctccgacggcgtcaccgccgtagtcagccagaaactcagccgctgaccccacatcgaagaccaccctccggcaccgcgcgccacctcccgccagcgggaggattaccgattgccgacccgctggcgggggctgtcggccgtaggccgactgggggtggccgtgcatccggggatgtggctgttgctccgcccgcccgacctttttcgcctgcgccgactctagcggcggatggccttggcccggctgacggtgtcctccacgaggacggcctgggcgtcgatgatcggcagctgaggcagcgggaacgcctcgttgagcacagagagctcggtgcagccgagcatcagcgtatcgcaacggcacgtgccggccggatcgagcatcgcctgcagcaccgactcgtagcgctgcagattcaggtcgccggttcccttcacgtcgtcgtagatcagtgacgtgatgcgctcctgcaactcgtcgtccggctcgacgaaggtgtagccggcctcctcgacggcctgacggtacacgcccgaagcccgcgagcccatcgtgccgaggaatccgacgcggtggaaacgctccttggggtattgcccggccatgtgcgcgacggcgccgcgcggcatgtgcaggatcggcaccggcgtcagtgactggaaatgatcgtagaagtaatgcgcggtgttgcaggtgagcacgatgaagctcgcgcccatcgcggtcgctttgtcgatgtcgtcggcgattatcgggaacgggtcatcgtcggactgcccgatgatgaacgcggtccggtcgggcacggccgcgtcgttgaacacgacgtagtcgaggaactcctggtcgctgtgggcgtgcgtctcacggttgaccaaccggatatagctttccgtggccagcgtgcccatgccgcccaataccgcaaaaaatggtcgtctcataaatgtcgccgtcgattccgaaaagtcagtcgttcttgccgagatacgtgtcgtagttcttcgcggtcagccggtgcagcctccacagcagcagccggcgcctgaacgacaggtcccgcccgtagcgcagcgtccagccggatttgcccgccttgtgcagcgcgattccgcggtcaagcgcctcccccggctccgcgtacttcttgagcgtcgagaacggcacctccagcagcatgctgtcaccgcggccgatgaccgtgtcgccctccatcgggttgccgagcaccaggtcgtcgacgaaatactcggccaggttgaagccgttaagcgtcacgaagaagttcgtgcggccctggcgcaggttgatttcgaacagcttgtactctccgtcgcgcgggtcgaacttgatgtcgaagttcgcgacgccctcatatccgatgctttccaggaagctcttgatcttcaggcagaatccctcgttgtagtcggggatgatcgccgcgtagttgccgatggcctccggcgtcgggtcggcgagcagcacgtggccgagcaccatcatgcgcacatggtggtcatggtcgacgtaggcgttgagcacgcgcatgttggcgtcggagccggggatgaagtcctggatgatcagctcggagccgtagccggcgccgtagatcgcggagacgacatgggccagctcctcgggcgtgtgcaggatgaacgccttcttgcgtccggggaagtccacgtgcaggtattcgacgctgttcgccggcttgacggccacggggaagccgaacggcaggtcgtgatacttgccggccgcggcaccggccttgtccagaacgaacgtgagcgggtgcggcaggtcatactgggcgcacagctcgtagaaggaggtcttgttgctcagacggtcgtgcaggtcggcatcgaccgacacgaacgtgaaatacggcttcagctcgtccttgtaccggctcagcagctcgctgtagtcgtcaccgcacgcgatgagcaggaacgtggtgtcgggtcgctcggacgtgagccggcgaccggcctcgaccatgtgacggcggaaggattccggctcggtgaagtccgcgaagaacgtcggctccataatcgaactgaatttggtgacggaaagctgcatacggccgtataccagcgatttcaggccatacgcgctgtggaacgcgcgggccatcgcgtaggcgcaggtttcactgccgagtagtacaggctggaaagccgtcattatcgatccttctgttggacgttcacgattgcttatgacattctacatactccgtgtggcgatgggaggccgtttcgtgcgcagagtgcgaagatgcggtcacgcgggccattgcccctggcgcggggggacgatacattgaaataagacgtattctcccgatggaacgaggttggtcatggaagagacgacggcacggggattcgcggaacttcgtgaggcgttggcgtcccgcaccgggacgcggccggaggactggttcccggtcttcaaggcacggtacggcatgcaggtggcgttcgacgccgtgaggtcggttcgtggcgacggctcggtgctcacccagctgttcacctgctgcacggcggtcgatccgattgttgtgagcgggctgagaccgcggtatgcggatgtgggcgccgacacgatgggcattgacgtcgccaaggtggaatccatgccgctggggagcgacgagcaggtgcatgcgatggtgatgcagcatacgtttggcgcgatcgatgaggactcgtcccggcggctggccgcgctggcggggcagatgggggcgttgctcgtcgaggattgcgcccactgcgtgacccgcatggcccgtgatgctgcgggatggccgttggccgacatttccgtgcactcgttcggcgtggagaagatgctgccgaccagattcggcggcgccatctgggtcaatccgcggctgcgtgagcgggatgcggcgctggacgccgagacccgaggccggctcgccgcgctggagcagccgtcccatcatctggatacggtcacgaaactgtatatcaacgagaaccgcgtgctgtcgcgtctgggcggattcggcgggcggatgcgtgagcgactcaccgcttcgggctggtatgagccgccgatttccgacaaggagcgtcgcggcgcactggaatatgagccgatgacggtgacgccgtggatcgcgcagcaggcggtggccggcatctccgcgctcgacgccaatgagaatgggcggcgcgcggtcgtgaccatgtatcgcgaggcttttgcgggcgtcgacgggttggacgttccggcagtggcgatggacggcgaggcgcagccgctgttgcggttcccgctgttcgcgcgggataccgaggcggcggagcgcatcatcgccgcagtgcggcaggcgggtggctacgccgaacgctggtaccgccccgaactgttccccggcgtgaccgatccggccgcctatgggctcgacacgttggaccgctccaccgtgccggtcagcgaccgtctggtctccaccgcgctatgcctgcccaccgaactgggtgaagacgcggttcgccgcgtcatcgacgccgtccgcgccgccgtctgaccaccggcacgtctgaccgccctctggcgcgcagcgggcggtcagacgtctcacccgttacaccgcgccgggaatcttacttcttgagggtgttcttcagtgatttggcgagcttgagggagctgtagaaggccttcttgatcggcacgtcacgcccggcggccaccggggtgatttcctcggtgaacttgcacttgaattcgttgaggccgttgaggctcggtgccagctcggagccgatgcccatcagatcgtattcggtgatgccctgcgagccaaggatgcagcactcggtgtacagcagcttgtcggtcacgtgcaggcgcatcacgtcgttgcgcatgccggcatagtagcgtaccgcgtgcgtgccgttgacggtcacgattgaccatgccaccacgcggccctcgatgcgggccgcgaacacgcggcaatgattcgcgcccagcgcctcgatcatgtcggagtagtcggtgatcggagcgggcgtgaatccgtcgcgcttgccggtctccaccatcacgtcgtagtattccgcgaagtcggcgatcgcctgcttcgtctcgtcggcgatgtcggccgggcattcgcgcagcgacttgcgcacgtcgcggcggccgcgacgcttcatgcgactcaggatcgcatcgtcgccgccggtcacgtcgatcaccacggtctggtcgtacggcacggtcgacagcaccggcacggtgccgtcggtgaaccacgtgtcgatgcggatgaacgccacgtgcctgtccgctcggtgcacttcggcggcgatcgcgtcgatggcctcgcgttccagcgcctcgtccggcttgacgatccagaccgggccgtgcatcgaacgcaggtaatggtatccgtgcgtctccatgtcgatgaatgcgatgaacgcgacggtctcgccgtctcgctggatcaggtacacgccccaaggagtgcggccggggatgtccgcctggaagcgtgcccacacgtcggtctgttcgatcggcagcgtcacgccggcatcggccgccgcctgttccatttgctggtagtcggttttctgtaacgtaatcatgcttgtcttgcttgtctttctatcggttcgtgcgctttggcggctcaggcgaacatgcgctcgacgatgcggtcgtcgccctcgaacggcacgtgcttgttgtggtccttgatccagcgttcgtcacccttgccgatgatgaggatgatgttgaaccggtcggcgtgcgctcgggcgtcatagatcgcgttcgtgacggcgctcgggcggtcggagatgacggtggacgcgatgccgggcacggtgatgtaccgttgcatctccatgcagatgtcgatgaacggttcagtgtccgtgtcctcggcggtgaagatgaagctgtcgatgcgatgctgcgccgcttcgacgatctccttgcgccggtcgtacgccttgttgccggccgagccggtgacaagcgtgatgcgcgggtgctgcgagccgaaccgctcgtcgacgaaatcgagcagcgcggtcacggaggcgtagttgtgcgcgtagtcgacgatcgccagcgtgttggactgcgggtcgtggaactgctccatgcggccggcgatgcgcaccggctccatcgcgtgcgtggctgcggcgtcggcggtcaggtcgattccggcggcatgcgcgatggccagcgccgctgccgcgttggcgtagttgaagtcgccgtccaacgccagacggaactcgccgagatcagcgccgtctgcggcgatacggtaggcgctgtgctcggcgttcgccgggcttgcggtgacatcggcggcatcggatccggcggggctctgcccgtccagcagctcgaacgtggtgaccggcacgccggcgtccgccgcgtcctgacgcagcaggtcggcatgatcgctggccgcgccgagcaccagcgcacggctgttgcgcacgatctggcgcttgcaatacaggtaatcctcgaacgtcggatgctcgatcgggctgatatggtcgggggagatgttcaggaacgcggccacgtcgaacgtcagcccgtacacgcgctcgaccttgtacgcctgcgaggagacctccatgacgaggtacttcatgccgttgtcagcggcctctcgcatcatgcggaaagcgtccatcgactcgggcgtggtcaggtcggactcgacgtacgtgtgcccgtccaggcagttgtccacggaggagaacagcgctgccttgccgtgcgagtgggcgttcagcacggcctgggtgaagtacgcggtcgtggtcttgcccttggtgccggtgatgccgaccacggtcagctcgtcctgcgggcgtccgtagaactccgcggacagcaggctcatggccttgcgtgcgtcattgacgatcaggccgggtgcgccggtctctgccgaaaaatcggtgtcggccacgtatgcggccagcccgcgctcgtcgatgtcatgcagatactcggccttgaaccgccccttgcagcacagcagcgtgccctcgcgcacgtccctcgtgtcataggtgatcgccgaaaaagcggtgtcagccccttcgatgtcgtgcgcatcaagcgtccaacgatccgcgcggatgatctcccgaagcagaccgtgccgcttgagcagttgcgccgccgatgccaacgttaccgtcataccaaaacctttcctcatggtgccgctgtcattgtacaagcccgacgaccgcgggaacgatatgcgcgacatgtgctgataagtccatcacaaaaccgtgcccacgctcacaatttcaccgcacgtcttgcatacaatagtgagcgtgaccgacgaacagcaaccgaacgagaccacggcgcaggcgcgagcgagattcgagaagctcgccatgcccgcggtcaacgcgctgtaccgccaggcgatgaagctcaccaacaatcccgatgatgcccaggaccttgtgcaggacacgttcgaacgcgggttcaaggcgttcgacagtttcgaggacggttcgaacttcgaggcgtggatgaccaccatcgagcgcaacgcatacttcaaccagtacgcgaaggcgaagcggcggccgcagcgggccaacgactccaccggcgaatacgacgactgggacatctacgcggcgtccgagcactcctcggaggggctgaaatccgcggagcaggagtatctggacgccttcgcgccgcaggagatcatggcggcgctcgcaaaactcccgcccgagcgccggcaggtgttcattgacgcagccatcgacggcaagtcgtaccagcaggtcgccgacgagcagggcgtgaagatcggcacggtgatgagccgcctgaaccgtgcgcgcacccagttgaaacgcgaactgtcatcgtacgcgctggcgcatggatacggcgacgcccgcaagcaactgccaagttcaccgtccgcgaactccagatccccggtgagcgttcataatggagatgacggaatgcgatccgttgcgacgagcgaaaggagcaggcgtgagtgaccctattgagcggcacagccatatttccatcacacggcagacgcctgtgggcatcgtccatgcggatatgcatatcacatcggtggagatttcgggcatgcccggtgacatgggcgatgatctggtcggggactgtttcgacccggattcgtgttgcgacgagcatgagaaggcgatgatcgcggcgctgcgtgcgtatctgcggcccgaggtcgcgccggaatgtctgctggcgcggttgcgcgacacgcttgaccgctgttgctgcgaggatggcgggaatgctgccggtgccgtcgacgagccgggacggtccgcgcaacccgcgcagcctgtacgcggcgctgcggtcgtgtcctgagacgcgatttcggcttgggctcctgtctcgaagctcggcaagcaggataaaacgggcctgcataataaaacggaataataagataacaaacgggtctgcccggctttcgctgggacagacccgttgtcgtctgttatgacaccgccgtatatggcgatgtctcgcggcgtggaatcacgccgtcaggcaagaatcaggcgttcggccttttgccgtggttggcggccttcttgcgacgatccttgcgcttgcgtccgcgcatgcccatgatggactcctttactacgattaataagccttgggaattatcacatacggggtagacgttgtgcaagtggcgaattgtcaccagccgtaggacggccgggtgtcggtcacttgaccgtcacctcgtagcgtaccacggtcgtgacgctcttgccgggctctatcacggtcaggtggtcgccgctgcggaacgcgttggccggggcggtcatcggttcgacggcgatgccgttcggatgctggtcgaacggggcgccggtggccgtgtagcattgccacgcgttgatggtctcgtcgccgaccagcttgatctccatgccatcggggcgggtgaacacggtcgttgtcgtgccgtcgtcggcgcggtggacgtccacccaggcgtcgtcgaacgcgcgtccgtccagaaccgggtcgtcgcgcagatcgaacttggtgccgtccacaggctcggtgccgttcggcaccagaccggcgtcaacggtgacgtgcgtgtccgcgtcgatcttcaggcggcatgcggccgaatcggcgtcacgctgctcgctggtctcgccgtttttgccgttcgccacccacgggtgcaggccgagcgcccacggcgccggctcgtcgccatcattgcgggcgctgaccgtgacggtcatgcccttgtcgttcagctcgtacgtggcggtgacggtgacgtcgaacggatagccgtcgaggttcgggaagcgcagtgactgggtgacgctgttctcggtgagcgattccagcttccacatgtactggtatgcgtagccgtggttcgcgttgttgcgcggctcggggtggcactcgttgaccggcgcgcagtagtgcttgcagttgaagtcgtattcgccgtccttgatgcggttcggccaaggcgcgaggatatagccgcagcaggtcggcgtcaggtcgtccggtccgtagctgcagaacacctccttgccgccgtagtcgaaacggcgcagcttcgagccgagctcgcagacgacggcggagaaatcgccatgatggatggaatactggttgccggtacgcggtgtggtgcccattgcttgctccatgatcgacagtgatattgttaccgctcgctatcatagtgtgcgctgggcttctgccgtgtgcggtcggggtgtcgcctgttgcccccgggcgttgtcatgtgccggtatcgcacgtgtagggatgttccggccgcacccgtgcgtgtgcctttgctacgctgagtcgttgtgattgagtgatgccgcatggcggccactgactgcatgaggaggatgatatggcgaaacgcatcgtgctggcggacccgcgcggattctgcgccggggtggaccgggcgatcctcaccgtgcagaccatcctgaaggccgcgtcggcgcgggtggatggcctgccgccggtgtatgtgcgtcgtcagatcgtgcacaaccggcatgtcgtcgaggatctcgccgcgcagggggccgtgttcgtgcaggagctcgcggagatacctgacgaggctgctgccgccggcatcccgatcgtgttctccgcgcacggcgtgtcgccgcaggtcaaggcggaggccgcacgccgcggcatgcacgtcgtggacgccacctgcccgctggtcagcaaggtgcatcgtgaggtattgcgtttcgtgcgcgaaggctacgagatcatctacatcggccatcgggggcatgatgaggcggtcggcgtggtgggggaggaccccgtgcacgtgcatctgatcgaacatgaggcggacgtggattcgctggatttccggccggagcagaagctggtgctgctcacgcagaccacgctcagcatcgatgagacggccggcaccatcgcggcgctcaagtgccggttcccgtggatgaaggagccgccgagctccgatatatgctacgccacgtccaaccgccaggccgcggtgaagctcgttgccgagcagtccgatagcgtggtgatcgtggggtcggcgaactcctccaactcggtgcggctcatggaggtcgcgcagggggcgttgggggagcgcgggcgagcgcaccgcgtggatgacgcgaacgagctcgacccgtcatggttcgacggggtcgaggcggtcggcgtctcgtcgggcgcatccgtgccggacgaactggtcgcgggcgtcatcgaggccttgcgcgcacagggcttcaccgatgtatccaccgtggagaccatcaaggagaacatgcatttcgtgcttccggcggaactccgccggaagccctcgcaggcgcggtagtgcgcctgctcgcctcatcgccgctggcgggacgaggcgtatagcaaaccctatgtgagggtgttcaacgccaatgacggggccgccacggttcccggcatcgcggcgggggagtgctccacactcgcggtcgacggcaaggtgacgctgacgggaggctccacggtgaacgtgggcgctgacgggtatgcggcggcgggactgtccgccaccggtgcgcccgtgggcgccgtcgcgcttgccgaccgcagccggggccttgctgcgacatcgtgaaaccagtggcccaagcggcggagaatccgccgaatagtcgaggcattcccgattcgcgctctcaaaactcgcagatacgaaaagccgtttgttggaaaatggcggtttccgatttcgtaccttcgagttttgagagcggtagtatggaaaacatgggcaaaaaaacgaagcatgagaagggtgccggctccacgccggcgactgtgcagctggagaaggccggagtgccgttcaagacctacgagtacgagcattccaacgaccacatggatgacggttacggggtggaagccgcgaagaagctcggattcgatgagcatcaggtgttcaaaacgctgatggccgacaccggttccgagcgcgtggtgggcgtggtgccggtcagcggacacatggatctgaaggcgttggcggcggcggtcggtgcgaagaaggcatcgatggccgacccgaaggtcgcgatgcgcgagtccggctatgtggtcggaggcatctcgccgctcgggcagcgcacgcatcacaagaccgtgcttgacgagagcgctctgcaattcgacgagatcctgctgtccggcggcaagcgcgggttttcggtcggcgtcaatccgcatgatctgctcaaggtattgaacgcggtcgctgggcccatcggtacgtggtgacggagtccggctcagcccgccggcaagtgccgagccggtaaaaacaaagggtttatggtttgggctcccacagcgaagcactgtgggagcccaaaccataaacccttgtggaatctagcggcctagaccgcggggattcactcggagatctcggcgaagtacagcagggtacggatcatgttgcaggtgaagccgtactcgttgtcgtagaaggacacggtgcgggccatcgtggtgccgtcaacggtgttcacgtcggtctgcgtcgggtcgaacacgccaccgtgggtgtcgccgatgatgtcggaggagacgatgccgtcctcgttgtagccgtagtactcggtgttggagaaggcttccttgaacgcggcgttgatctcgtcagcggtgacttccttgttcaggacggtggtcagctcggtgatggagccgtccgggacctggatgcgctgggcatggccctgcagcttgccgttgacctcgggcacgaccttgccgatggccttggcggcaccggtggagtgagggatggtgttgatcgcggcggcgcggttgttgcgagccttcgggaagcgcgggccgtcgaggatcatctgggtgccggtgtaggcgtggatggtggtcatgaagccgagcttgatgccgaacttgtcgttcagcagcttgaccatggcggccatcgagttggtggtgcaggaaccggcggacacgatgttgtcggaagccttcaggatctcgtggttaacgccgaacacgacggtcggggtggtctcgtccttggccggggcggagatcaggaccttcttggcgccggcgttcaggtgggcctgggacttctcggcggaggtgtagaagccggtgcactcaagcacgaactcgacaccgtcgttcttgacccacgggatgttgttggcatccttctcggcgtagaccttgtattccttgccgtcgaccacgatggcgtcgtcggtggaggtcacgtcgaccggggtgccgtcgtcgtgacggaaggtgccgtgggtgctgtcgtacttcagcaggtaggcgagcatggacggcgtggtcagatcgttgattgcagcgacctcgatgtcaccggcctggccaccgcgagcctgcagctcgaagatgcggcggaaggcgagacgaccgatacgaccaaagccgttgataccaatcttaactgtcatgtgttctccctttgtagggtagaccgtttgcgcatggatgcgctatggcctttgtttaccaacagtgtctactgtaatgcgccgtctgtactagagcaacggtgtcgcgcttgctttgagcataaaacggccatatttcgttaacgctaacaaatatgtctgtacagcctgcggcgattcgatgcgaggcattccgcaccgcggcctcaccgcaccgccagcgccgaggacaccgtcgtgtcgagcgcgcccagatccccgccgaacggatgccgcagtctcaccacaggcagcggcgcctcgatcgggaacgtgatgatcagcgtgcccgactccaccgagaccgtcgccgcggaaccgtccacgaactcgttgctcaccccctgcacgacggtgttggcgagcgcggcgccctccagcacgtatttcagcccggcgatggtgacgccatggcagacgtcgctgtgcgagaacaccgagatcatgcggcgcggggcgacatgattggccgggaactccagcgccccgtccgcgatcgcggtaacgatgctgccgtcgccgtacagatatccgatgccgccatgcgaggccagtagcgccatcagctgcatgttggcgatcgtgtggtcgatgcgaccgcccagcgctccatatatatggaactcgcgtgcgccgcggctccatccgaccttcagcgcgctcagcagatccggatcgtccttctgcggcggcaggcggacgctgcggtcgccgtccggcacgtcgccggacagcgaatcgaaatcgccgatgacgaaatccggcgacagccccatcgcccgcatatggtcgagcccgccgtccgcggcgatcgccagcatccccttctcgatagcgggcgcgggcccctcgtaatactcgccagcgccgaaaatcacgcaacgttcatatgccatgctgccactgtatcgtgtgcacggcactgcgcgtcgcgcctgctgatcgtcaccgtgtcgacgaacttcccggtcatcgccgcgttagctgcatgccgatcttcgtgccgccgctattcctgctcggcacggtcacgccgggcctcaacaagttcgcggccgactcgctggggaacaacgcctccgtcgtcggacgactgtccgcctgcaatacggtcggctcgattctcggcaccttcctgccgaccttcgtgacgatccccgcggtgggcacgttcgtgacgttcccgatcttctccggaccgcttctggcatcggcgatgggcgaggtggcgggccggttcgagaccatcgccgacccggacggcaagccgggcgccacgatcctgaccgacgacaaggcgccggtcgatggcttgcctgcgcctggaccggaacttgtggcgacacgcccggtctgggggtgtggtagtatctacaaggcttgagaaatcaagaaagcggggcaaccccacctggaagcctgtcatggcctcgggtccaaggcaatagcctatccggtcgcgtggaatgcgcggtcgtgagcatgcctcatgaggcatgcgatcatgcgaatatgtatgatggccggcgctgcagtgcgcacggttcggtgagccatggattcgtccgtcatgcccggtatccggcgaaggtccgcttcggagaacatgaggattggagtcatcattagcgacgaaccacgtatcaatgacgagattcgcgtctcgcaggtacgcctgatcggcccgaacggcgagcaggtgggagtcatcgcgacctcggtcgcgctcaacctggcgaaggaagcgaacctcgatctcgtcgaggtggcgcccaacgccaagcctcccgtcgccaagctgatcgattacggcaagttcaagtacaacgagaagatcaaggcccgtgaggcccgccgtaaccagagcaccgccgaaatcaaggagatccgcttccgcctgaagatcgatgatcacgatttcgaggtcaagaagggccatgtggtcaggttcctcaacggcggcgacaaggtcaaggtgaccatcatgctgcgcggccgcgagcagtcccgccccatcggcggcgtcgaactgctgcagcgtctggccgcagacgtcgaggagtacggcaccgtcgagtcccggccgaagcaggaaggccgcaacatcatcatgacgcttgcgcccaagggcaagaaggtgcacacccagtccgagcagcgccgccgcggcgaccagtcgcgcgccgagcgccaggcccgtcaggccgcccgcctcgccgccaagcaggaggcgcagagccaggcagcggcggcgtccgcagccgcgatcgacgaccaagacaagacttccgaaacgaagtaaccaacaaggagggcagcaatgccgaagatgaaaaccaattccgccgcgtccaagcgcgtccgtgtcaccggctcgggcaagctgatgcatgcaggcagcgccatgcgccacaatcttgagcacaagtccgctcgcaagcgtcgtgcgctgaaggccgacggcgtgctggccacggcccagtccaagaacatgaagaagctgctgggccgctgaaccgcgccagccgaatagatacgtcaaaagaaagctgaggaataactatggcacgtgtcaagcgcgcagtgaacgcccacaagaagcgtcgcgtcgttctcgaaagggcctccggctaccgtggccagcgctcccgtctgtaccgcaaggccaaggagcagctgctgcactcctttacctacaacttccgcgaccgcaaggctcgcaagggtgacttccgcaagctgtggatccagcgcatcaacgccgccgtccgcgccgaaggcatcacctacaaccgcttcatccagggtctgcacctggccggcatcgagctggaccgccgcgccctcgccgagctggccgtctccgatcccgagaccttcaaggccatcgtcgagcaggccaaggccgctctgcccgaggacgtcaacgctccggtcgaggcctgagccgcgaacctcggcggatgcgccttcgcgcgcatcggcaaccgcatgagaaccccgccctgtgcggggttctcgcatatcatgcgggaacgtgcaggtatgcaagccttccgcacgcatacagggttctcgcatatgatggggcaccatgtacaacggatccacccggcttcttgaccagttcatcgcgcatatctccgtcgaacgcggactggccagggcgaccgtgcgggcatacgaatccgatcttcgccgctatctctcgtggctcgcgcacacgcgcggcatcaccgatcccgatgccatcggcaaagccgacatcgaggagtacgtggcgcagctggattcggacggcgacagcgcgcgcagcaaggcgaggaggcttgccagcatccacgagttccaccggttcgccctcgcgcagcacgccgtgagcgacgacgtgtccgccacggtcaaggcacccaagagcgcgcagatgctgccggatgtgctgacgatcgacgaggtctcccgcctgctcgacgcgattcccgacccgcacggcaccgacgcggcgcgggggagagctggcatcggagcgttgccggacgccgtgctgctgcgtgacagggcgctgctcgaattcatgtacgccaccggatgccgcgtctccgaagcggtcggaatgaatctggacgacatcgacatcgacgacgcgcatgtggcgcggctgacgggcaaaggatccaagcagcgactcgtcccgctcggcgaatacgcatgtcgcgcgctgcgccgatacctcgccgaggggcgcggcacgctggagggccgcgccaagggcacgccggaccgccgcgcggtattcctcaacaaacggggacgccggctgtctcgccagtcggtatgggaggtcatcaaactggcgggggagcgggccggcatcgatcgtccgcttcacccgcacacgctccggcactctttcgccacgcacctgatccagggcggcgccgacgtgcgcaccgtgcaggaactgctcggccatgcctcggtcaccaccacgcagatatacacgcacgtcagcccggagaccttgattgaggcgtacctcacctcgcatccgcgcgcgcggtgaacgcggagcggttgcccgggcgcgatagcatggatgcgacatgcgaaggaggcagctcgacatgcagcaggcggcatattcccgcttcgacggcgacgacgcgggaaacaggcagggaacgctgccgatccgcggcacctacgccgccgcgccacggggagacgacgggtcttcggcggaaacggtgatggtcggcacgtccggcggccccgcgcacactggtgatgataaggtgaacggtatgcctactgatctgcttggacgagaatacgagacgttccccgcgccgaaaccgctgtcgcagcacggtcccgcgcgcatcatcgccatatgcaaccagaaaggcggggtgggcaagaccaccagttccatcaacatcgccggcgcgctcagccagtacgggcgccgttgcctgatcgtcgacttcgacccgcaaggagccgcgacagtcggcctcggcatcaacgcgaacgctgtcgagaacaccgtgtatactgcgctgttcgacccgtcgatcgatccgcacgagatcgtacagcacacggatttcgagaatctggacatcatgccggcgaacatcgacctgtccgccgccgaggtgcagctggtcaccgaagtcggtcgcgagcagatcctcgccagcgtgctgcgaaagctccgcaacgaatacgacgtgatcatcgtcgactgccagccgtcgctgggcctgctcaccgtgaacgccttgaccgccgcggacggcgtgatcatcccggtcgccgcggagttcttcgcgctgcgcggtgtggcgctgctcatgcaatccatcgagaaggtgcagtcgcgcatcaaccccgacctgcaggtctacggcgtgctggtcaccatgttcacgcgcaccctgcactgcgaggaggtgctgcagcgcatctacgaggcgttccaggacaaggtgttccattcggtcatctcgcggtccatcaagctgccggacgccaccgtggccgccgccccgatcacgatctacgctcccggccacaagaccgcgaaggaataccgcgaggtgtcgcgcgagctgatcgcccgcggcatcgtcgcgtgatggcgcggccatggtgagcggcgcaagcgcgatgcgatgagcgagttgacggaacctgccgacggcggcgagatcggaggcgatgccgccgtctccccgggattctccgtcgaactggaggtctattcggggcctttcgacgcgctgctgtccatgatcgcgaaccggcggctggagctcaccgaggtgtcgttgtcggagatcaccgaggagttccttgcctatgtgcgcacgctggatctcgcgcgcgacatggaggaggcgagcgcgttcctcgatgtcgcctcggtgctcgtcgaggcgaagagcgcggcgctgctgccgcatgaccagacggatggggagcgcgacgagcagagtctcgaagcgctgcgtgagcgtgacctgctgttcgccaggctgttgcagtatcgtgcgttcaaacaggcggccggcgattttcgcgcccggctcgctgccaatgccggcaggttcccgcatccggcatatgtcgatgaacgtgtcgcggcgatgctgccggagcttgcatggtcgctgggcgcagaggacttggcgcgcatcgccgcacaggtgttcgccaacgcgccggccagcgaggtgtcgctgcatcagctgcatgtgccgcttgtcgacctgcgcgcgcaggcggcggtcgtgcgcgaccggttgcaggcgttgccggccggcggttcgatgacgttcgtggaattgacgcgtgacgcacaccgccgtgtagaggtggtcgcgcgttttctggcggttctggtgttcttcaagcaaggcgtgctgcagtttcggcaggccgggccattcgagacgctgcatctgcgctgggtcgaagacgcccaggacaccggtgtggtcgacatcgcggagggggacttcgcatgaggctcgcaaaacgtgaagatacaggcagcgtcgtattggaaaatagcggtttggttttttatatctcgacgttttgtgagcgagaaaggtgacgtgatggatgcgcaattcacggcggaggactttccgggtggtctgagggcctgcatggaggcgattctgatggtcgccgaccagccgcagcacgccgccgacctggcgcgggttctgggcgtgggcgagcaggaggctcgtgccgcgctggagcgtctgcgctcgcagtatgacgaggaggggcgcggcttcgagctgcggcataccgcgcgtggctggcagttcgcgagccgggcgcaatacgagcaggtggtgtcggcgttcgtgactgacgggcagaccgcgcgcctgtcgcaggcagcgttggaggcgctggccatcgtggcgtacaagcagcctgtgacgcgcgcccaggtcgcggcgatccgcggcgtgaactccgacggcgtgattcgttcgctgacagtgcgcggactggtccgcgaggatggcgtggacgaggattcccgggccgcgctgctggtaacctccggcctgttcctggaacatctcggattggagtcgctcgaccagctgcccccgctcgccccattcctgcccgaacgcgagaccaccaacgtccccgacggcgaataggagttgccggagggctgtcggccgtaagccgactggggtggtcggtgtttcagcgtatgtaggttatgccgcctccgcggcctcgcatgacacaccacttaaagtcatgttgactataagtgatatgctctggtcttgaactggagagcacaccagtcggaaagtgggcatgcatggtcggcggaaacgtgtcggagcggcggatgcaaccgccggccgtcggggtctccgtggtgatcctggccctggggccggaggagaccgcgtcggattgccgtgacgcgatgccctcgcgtctgtggctgccgctggtgcgccgcgtgcgccagccgtttctggggcggtgggcgctgccgggcggcgatttgcgcgccgaccgttcgctggagcagtccgcctaccacgcgttggagaccaccacggacctgcatcctcgctaccttgaacagctgtatacgttcggcgatcccgcgcgatcgcacggtggcctgccgatggtctccatcgtctactgggcgctggtcggcaaggccgaagcccatgatttcaccgaggcggacaacgtccggtggttccccgaggacgagcttcccgaactggccttcgaccatcggcagatcatcgactatgcgttgtggcgcctgcgcaacaagatcgaatacccggatatcgccaccaagctggtcggtgacacgttcacgctgcgccagctgcatcacgtgtatgaggccataaccggcgaggccatcgacgtggcgaatttccggcgtcgcatgctgttgtccggcgagctggaggataccggcgagaaactgcgcgatggccgccaccgcccggcggccgtgtaccggtacaaccccgaccgttcccgcgcgtcgacggccccacccgtcgggccgccacgcgacgcgccgaccatcgaggagctggaggaccagcgcatcgaggacgcgctgtccgcgttgatgccatcggcacgcgcatgacgggaggcgggcggcaagacccgcgtccgtgccgtataaccgcatattgattttggccggccacccggttgtcagatacgttggcgtgcccgcacgccttagagaaaggaacacaccatgagcgcaacattgtccgccctgtcagtggatgagatcatcgcccgcctcggtgcgcagagcacctgcgacgccggcctgacccaggatccgtggcatttcgacaccaccaagcccagctacgggccgggtgcgtccatgctcgacaagctgccgcacaacgcgcctcgccagcaggtgctgccggaggagtaccgcaacgcctccgacgaggagctgcaggagcgcattcgctcggccaagtcccgtctcggcagcaagctactgattctggggcatttctaccagcgtgacgagatcatctgccacgccgattacgtgggcgactcgttccagctggccaagaacgccacgcagtgcccggacgccgaccacatcgtgttctgcggcgtgcatttcatggccgagaccgccgacatcctctccacgccggagcagaccgtgacgctgccgaacctctccgccggctgctcgatggccgacatggccaacatcgaccaggtcgaggaggcctggagccagctcggcgagatctgcggcaccaagcccgacgcggacggcaggcagcagatcatcccggtcacctacatgaactcgtccgcggccttgaaggcgttctgcggacgcaacggcggcatcgtgtgcacctcgtccaacgcgcacgccgtgctcgaatgggcgttcgcgcgcggcaagcgcgtactgttcttccccgaccagcatctgggccgcaacaccgcccgcgcgatgggcattccgctgagcgagatgccgctgtgggacccgtacaaggcgcagggcggcgcgaccgacccgtctgactacgccaaggccaagatgatcctgtggaagggcttctgctcggtgcaccagcgcttcaccgtcgaacagatcgagaaggcgcgcgccgcgttcccgggcgtcaaggtgatcgtgcacccggagtgctcgatgcaggtcgtggacgcggccgacggcaccggctccaccgcgtacatcgtcaaggagatcgccaacgcgccggccggatcggccatcgccgtgggcaccgagatcaacctcgtgaaccgcctggccgcgcagtaccccgacaagaccgtgttctgcctggatccggtggtctgcccgtgctccacgatgtaccgcatccacccggcgtacctcgcctgggcgctggagaacatcgaacagggcaacatcgtcaaccgcatcaccgtggacgacgacaccgcacgcgaggcaaaggtggctctggagcgcatgctccaggtgcacccgtgatcgcaagctcccgtcaacgggagcacatcaacaacattgaggaagcagcacaatgagcaacgctgaaatcgtcgtagtcggcgcgggcgtcgcgggcctttccgcggcgctggcggtggccgatgccggccaggacgtgacgctggtcaccaaggccgacctggtggaatccaacacctaccatgcgcagggcggcatcgccgcggcggtcttcgccgacgacgacccgaaactgcacgcggccgacacgatggccgcggggcatggtctgtgcgagccccgtgccgtggagatactgacccgcgagggcgccgaccgtgtgcggcagttcgccgccgcgggcgtgcatttcgatcgtgacgcgcaaggccacatgctgcgtggcctcgaagccgcgcattcgcgggcccgtgtcgtgcacgccgggggagacgccaccggcaaggtggtcgaactggatgtgtccgccatggtgcgggccaatccgctcatccacatcatcgagcatgcgttccttgaggatttgattgtgcgcgacggcgccatcgccggcgtgcggctgctcgtcaggggcggcgagacattccgcagcgccgacatggccgcttcacgcgtcatcctcgccaccggtggcgccggacgtctctacccgtacaccaccaatccggccgtcgccaccgcggacggtctggcggccgcatggcgtgccggcgcacaggtcgccgacgtggagttctaccagttccaccccaccgcgatggccgtgggcgagcacttcctcgtttccgaggcggtacgcggcgagggcgcggtgctgctcgacgaacacggcgaacggtacatgacccgtgtcgacgagcgcgccgaactcgcgccgcgcgacgtggtggcccgcgagaacttccgcgtcatgcaggcgcagggcggcaagcccgtgatgctcgacgtctctccgatgcgccgcgagaacccggatctggccgagttcctgcgtcaccggttcccgaccatcgacgcctatacgcgttctctcggcttcgactggagcaaggagccgattccggtcgcgcccgccgcgcactactacatgggcggcatccgcaccgatctggaaggtcgcgcgagcatccccggcctgtatgcggccggcgaatgcgcccgcaccggcgtgatgggatccaaccggctcgcgtcgaactcgctgcttgaaggactggtgtacggtcgtcgcgccgggctcgccgccgtgaacgatccggccggttccgtgtggaatccggtctggttctccaactcggccaccagccgcatcgtcagcgacacaccggtcgagctgagcatgccggcacccgatgagcgtgccggggccaatggccggcctgccatctgggatcgcacccgcatccagaacacgatgtgggccggcgtgggcgtgttgcgcgacggcgacggcctgcgccaggccatcgaccagctcggcaccggcctggcgctggccgatgccgacgcgacggaacccgctgccacggcctgtgagcctgacccgatcacccgcctggaaaaccgcaacctgctcaccgtcggctacgtcgaggccaacgccgcgctgcgccgcaccgagtcgcgcggcgcccacgcccgcaccgactatcccgagtcatgcgacgagtgggcgcaatccatcgcctacatcaacgcctagcgctgtttgctcacttgtcggttggcgccggactgtcgttgcacgccgccggagtggtctcggtaccctgacccgatgcattgcgattaatcccgcaagaacgacagcagtccatatcaagaaagacccgatcatgcttacgcaacacatcatccgcaccgccgtcgaggcggcgctcgccgaagacgcgccctacggcgacatcacctgcgagaccacaatccccgcggacgaaaccggctcggcgcacctcaccgcacgcgagaggggcgtgatgagcggcatcgccgtgttcacggccgccttcacggcgcaaaatcccggtatcggcgtctcgcccctgatcgcggacggggagcgattccagcgcggccagatcctcgccaccgtggaaggtccggtacgtgacctgctcgccgccgaacgcatcgccctcaacttcacccagcgcatgagcggcatcgccaccatgaccgcctccttcgtggacgcggtcaacgccatctacgatgacggacatgacgggaccgtcacccggccgcatcgctacgagcgcactcgcatcgtcgacacgcgcaaaaccacccccggcctgcgcccgttcgagaaatacgccgtggtctgcggcggaggccacaaccaccgttacgggctgtccgacgcggtgatgatgaaggacaatcatctggcggcgctcgccgcacgcggcatcgacctgaccggcgcgatccgccacgtgcgcgaacaggtgggccacaccacgcatatcgaagtggaagtcgaccggcttgagcagattcccgccgtgctcgccggcggtgcggacaccatcatgctcgacaacttctcgctcgatgacacccgccgcggcgtggatatcatcaacggcaaggccatcgtggaagccagcggcaacatgagcatggagcgcgtgccggccgtggccgccaccggtgtggacgtgatctcagtgggcgcgctgacgcacagcgtacgcagcatcgacctcggattggactggaactagccatgactgacactcccaatgcatccggcgaacccgacgagctgtatctggacgccgctgccaccgagccggtgaccaggaacgtcatcgaggcgatgatgccgttcatgaccgacgcatacgcgaacccggcaagcgtgcatcaacccggcaagacggcggcgagggcgcttgatgccgcccgcgcctcgttcgccgccggtctcggcgcccgcccggacgacgtgatcttcacttccggcggcaccgagtcggacaatctggccatcaagggcatcgccatggcacgtatgcgcgcactcggcctgcagccggtctacggtcttgccggaatcgatgacgagccgtccggcgtgaaccccgcacaggccggtgaacatccggcgatccgccgtccgcgcatcatcatctcatccatcgagcacccggccgtcgcgcaatcggcgcaatggctgcacgaatggttcggcttcgaagtcgtgcacattcccgtggacggtcaggctcacctcgaccttgacgcgctcgaacaggagctcgacggcgaggccggtgaacgcaccacgctggtttccgccatactggccaacaacgaggtcggcaccgtcgaacccgtggaggagctggtccgcatcgcccacgcgcacggggttcccattcatgtggacgccgtgcaggcggccgggcagattcccatccgcatgcgcgattgggatgtggacgcgctgagcgtgtccggacacaagttcggtacgcccaagggactgggggcgctgctggtccgcggtcgaaccccgatcgagccggtgctttccggcggcggtcaggagcgcgggctgcgctccggcacgcagaacgtggccggtgcggtggcgctcgccatagggctcaacgagtcgaacgcgcgcatggcggcgcagtaccgggaactgacggattcccgcgacatgctgattgacgccgtgcggcgggtggtgcctcgcgccgaactcaccggcgacccggtcagtcgtctgccgggacatgcgtcattcattttccccggagtcaccggcgaagctctgcttgtcgatctggacgcccgaggcatagccgcctcgtccggatccgcctgcgccattggccgtcatgagattcccggcacactgcttgccatggggctggaaccgcagatcgccaaatccgccctgcgtatgacattccgccgtcccctcacacgggaggaaatcgagcgcatctccatggccttggaagactcctacaccgagctgacgcattagtgcacatggtctccagtcaacgatccctgcgggggcaacgtgtgctgttacccgtcggagggcggttcggttgtgtgtcaaggcgtatcgctaggcttatgccggtttgcgtgtaagtacagatatgaaccaaaacaagtaccgaacggttacgcgaagaatcaattaagagaggtttctatggcggttcgcggtgatattcgtaatgtggctatcgtggcacacgtcgatcacggcaagaccacgctggtaaacgcgatgctccagcagtcccacgtgttcaacgagcgcgaggaggtgccggatcgtgtgatggactccaacgatctggagcgcgagaagggcatcaccatcctggccaagaacacggccgtggaatacaccggtccgctggcggccaagtacggttacccggacggcatcacgctcaacatcatcgacacccccggccacgctgatttcggtggcgaggtcgagcgcggcatctcgatggtcgacggcgtcgtgctgctcgtcgacgcttccgaaggcccgctgccgcagacccgtttcgtgctgcgcaaggcccttgaggccaagctgccggtgattctgtgcgtcaacaaggtggatcgtccggacgcccgcatcgaagaggtcgtctccgaatccaccgacctgctgctgggcctcgcccaggatgtcatcgaggaaggcgtcgacctcgaccttgaccacctgcttgacctgccggtcgtctactgcgcggcgaaggccggctacgcgtccgtcaaccagcccgagaacggcggcctgccggacaacgacaaccttgagcctctgttcgaggacatcatcaagtacatccccgcccccgaatacgaggagggcgcgccgctgcaggcgcacgtcgccaacatcgactcctccgacttcctcggacgactcggcctggtccgtatctacaacggcacgctggagaagggcaagacctacggcctgtcccgcgtggacggttccatcgagaacttccgcgtcgtcgaactgctgcgcacgcagggcctggagcgcactcccgtcgaatccgccggccccggtgacatcgtcgccgtcgcgggcgtcaacgacatcatgatcggcgagaccatcgtcgacccgaacgacccgaagccgctgccgctcatccacgtcgacgacccggccatctcgatgaccttcggcaccaacgactccccgctggccggccgcgaaggcaaggaccacaagcttaccgcccgcatgctcaaggatcgtctcgaccgcgagctcatcggtaacgtgtcgatcaaggtgctgcccaccgaccgccccgacgcctgggaagtccagggccgtggcgagctcgcgctggccatcctcgccgagcagatgcgccgcgaaggcttcgagctgaccgtcggccgcccgcaggtggtcaccaagaccatcgacggcaagatcaacgagccgatggagaacaccaccatcgacgttcccgaggaatacatgggtaccgtcacgcagctcatggccgaccgcaagggccgcatggactcgatgagcaaccacggttccggctgggtgcgtctgcagttcaccgtgccgtcccgcggcctgatcggcttccgcaccgcgctgctgtccgccacgcgcggcaccggcatcgcctcctcgctgtccgccggctacgcgccgtgggccggtgccatcgtcacccgccagaacggctcgatggtttccgaccgcgccggcgttgccaccccgtacgccatgcagcggctgcaggcccgcggcaacttcttcgtcgaaccgcagtccaacgtgtatgagggccaggtcgtcggcatcaacaacaagccggacgagttggacgtgaacatcacgctggccaagcacatgaccaacatgcgttcctccaccgccgacgtgctggaaacgctgactccgccgatcaagatgagccttgaggagtcgctcgacttcgcgaatgaggacgagtgcgtcgaggtcacccctgaggcgattcgcgtgcgcaagatcatcctcagccgtgaggactggtacaagtggcgtgccaagcagcgtcgtcagaacaacaacgcctgacggcgttgccgttctgacgaccgtcgcgggcgctgattgcgcgcccgctcccttcacctacggacagtccgctggactgtccgtttggcggttcagcagtccaacaacgcctgacggcgttgccgttctgacgaccgtcgcgggcgctgattgcgcgcccgtctgcttgcttctgattacggagagtccattgggctctccgtttttgtttttcgaggggctgttctgacgggtctgtgtgccacaccaggccgatttcggcgtttttagggctggtgtggtacgacggaaattcctgcgattgggacgaatgtttgttcatcgttgaaaaatggcggtttctatgattttgcctgttgccataccagcgaatgttagggctaacattccattgtgtggcaatatgttggccacacaatgcgatttttgcctgttttgacgctggtgtggcatgttctgcggcagcggcatggtgttatgtcccgccagcgggggcaagatatgagttcgccgggccttctggcctgtaattggatggcctgcggacacggcttccgctgtttgccatacggctcattgcgccagcggagcgagatttcaccgcgccgatacagcgcatctccttatactggtgaccatgactcaatcggatgatcgttcaattctgccttggtctcatcggctcagccccgtgctgcgcggactcgtcaccgtcgttgccggcatcctgtgcggcatcgtcggcacgttcgcgcatcgcgtgggcgcttcggccaacattccgtatggactggtgctcgccttcctgattcttggcatatcggcgtggtgtgcacgctcgcggcttgacgtcgtcggtctcgccctgcacctgatcgcctcgtccggcacgatatggctgatcgctgtgcaatccaccggcgacgcgttgacgccggtcggattcagcggatcatcggtgccgtatttttcccagcgtgtgggatacctgtggctgatcggctgcatcgtcgtccagctgatgctgatgttcctgcccgcgcgatggttcgccatcacgcccaagaccgatggaaagaccgacgacaagaattcgcagcagccatcgcagctgtccgtgtcccggcagactcccgacacgctggcggagagccgatgatggccgagtatacgttgcatttcctggggccgaccgggacgttcacccatcaggcggcgatcgaggccgccaagatgatccgcccatccggcgcatccgtgacgctgacacccgagccggacgtcccgacgattcttgacgcggtgcagcgtcggggtgactggggcatcatcgcgtgggaaaacaacgtggaagggtacgtcgtgccgaacctcgacgcgctcatcgacgctgacaatgtggtcggattcgcccgagtcggcgtgaacgtgtcattcgacgccttcaccttgcccggcacatcactcgccgattgccgtaccgtcaccgcccatccgcacgggttggcgcaatgccgccgtttcacggccgaccatcagctgcagcagctgccgtcatcgtcgaatggtgccgcctgccgagaccttgagcccggccaggtggcgctcggaccgagcatctgcggcgatttgtacaatctgacgcgcgtcgcccccgccgtgggcgactatgccggcgcgcgcaccgagttcctggcactcgccccgcgggacgaggccatcaccgtgctgcgcgagcgggcatcacggacggccggggatgagacagtggaatcgatgccggctccgggggagacgaccgaccccgtttcggaatacgaatcgatcatcgcgttcataccgctgagcacaggccccggcgtgctcgcgaatctgctggacgtgctgcgcgacgccggtctgaacatgacgagtttcatatctcgcccgattaagggacgcgacggcacgtacagtttcatcgcgaccatcgatgcagcgccttggcaggaacacctgcgcgacgtgctgacacaggtcgtcgaccatggcgattgggtgaagacgctggcggtgtatccgcgccgcgaacggccgaacccgccgatctacgcgtggtcgctgcccaacgggggagtgcgccgcgagccggccgcgcccggcacatggacggaaggcgacactgcgcgaagggaattgctgtggtaggaagtcatgatactgcggccgccgtacggctcacggtcggagtcatcggactcggcctgatcggcgggtcgctggcccgaaggctcgccatccgcggggtgtcggtcgtcgcgtggaaccatcgcccgcatccatacgcccaggccgaagccgatggcatacgctgcatgcgcacgctcgccgaactggtcgaagcgcagccggaggtcatcgtgctgtgcaacccgctgaaggcgatgccggcgattctcggcgagttgcggccgctgctcgaaccgtatcaggacatcacgctcaccgatgtgggcagtgtcaagatgatggtccgcgatcaggtgcgggacgcgggtctggcgggccgctatgtcggcgcgcacccgatggccggcaacgagctctcgggatgggccgccgctgccccggcgctctacgacaacgcgctgtgggccatgaccgtggatggcgacaccgattaccgtcgttttctcgccgtcgcgcggatgatcaccgacgatgcgggcaaccgcgtcatcgtgctcgacgacgatacccatgaccgcgctgccgcgctgatctcacacatgccgcacgtcgtcgccacggcgctcatcaaccagctgaccgacgacccggaccgcaacatcgcagctgcgctcgccgcgggaagctggagggacatgacgcgcgtcgcgctgaccgatccggaccgcacccgtgcgatggtcgaagaggacgccgacaatgtggaacgactgctgcgcatgatggcggcgcggcttaccgaggtcgcggacgaattgcatggcgcagatgcaggtgccatcgccgcgtttttcgcggatggacagccgttccgcgactacaagtccgcggtcagaagcggtgcggacggggacgggccggtcttcgacctgacgatacccgcggagggatggcaggcggcactgctcgattccgcccgccgcggcgagcatatcctgcgtttcggcgacgactataccgcctgcgtgcagcgtcgcagcgcgatgtgatgctgcgggctacttgacgatagaccacccctagtcggccacgggctgactaggggcttgacggcaccacagctcaggggcgggtgaagtggcgttcggggacgggtttgagggtgatgatggtgtcggcgtcgatggtcacgcgatgttcggggcgtgacccgttggccgccgcgtcgcggatcatatccaacgtgtgaccgtcccatgaggtgacgtgtccgacgtaatcgcggtatttcatgcgatggtcggtcggatcgaccccttcggacactcggacgaccactcgcgcgttggcagggatttcattgggaattgccatggggactcctttgccgtcggtttgttccattctagtgggtgaaacgcggttttgcgggatagaatcggcaaagaaaggagtgtgcatggatggcgatggtgatctgtccgcgttccttgcgtatctgcgggccaacaggggattgtcggacaatacggtgaaggcgtacggcaccgatgtcagggagtgcctgcatgcactggcgtcgcgcggcatcgcagatctgcgtcaggtcacgaccgacgacctgcgtggatggatggcgttcgagacccgcgaccacgcccgctccagcatggcccgcaaggtcgtgtcggtccgttcgtttttcgcttgggcgcatgagcatggcaggatcgaggccgatccggcggccgtgctgatgacgccgaaactgccggacacgttgccttcggtgctgactgaggcccaggcggagcgcctgatggaccgtgtggatgacgatgcgtcgctgcatgccgcctcatcgcagcgttacgagacacggcatgatgagatgccccgccttgattcggcccatcggggcgaagggatgagtcagcgtgacgaagtcgtggcgctacgtgatgcggccatgctggaattgctgtacgcgaccggtatccgcgtggcggaactcgtcgggctcgacatcggcgatgtcgactggtcccaccgcacgatacgggttacgggaaagggcagcaagcagcgcgtggtgcccttcggcgaccctgccgagaaggcgctggccggctggaaggagcatggccgaccattgatattgcgcagagccggtgcgggcactctcgatacggccgcgttgttcctcggcatgcgcggccgccgcatcgaccagcgtatcgtgcgcgatgtcgtgcatcgtgccgcccgcgagagcggggtgcccgatatcagcccgcattcgctgcggcacagcgcggcgacgcacatgctggacgggggagcggacctgcgcgaggttcaggagatgctcggccattcgtcgttgcgcactacgcagcggtacacgcatgtgtcgatcgagcagctgaaggagcggtaccgccaggcgtttcctcgggcctgacatcgtcacgttccgagcttgatcgtcccgcgattgcctacgtcgacaactccgcgataactccgcggccatcctgcgcttaccctgcgcttaccctgcgcttaccctgcgcttaccctgcggtcatcttgcgatcaacccgtgatttcgcctcgattgccctgcaatccgcatgattccggggtgcaacaggcgaattgtgcacgttcacatcatttaaaatcttgaaatgtgatacaaatatgaacaaaatgtggcaaataacgtcgaaatcttgacggaagcgtatccttatcacgttttgcgtttacatggggtgactataatcggtcaccaacaagaacgccgccatccaaaggcgacagtcgagtgaacgcttttgtcgttcggaacaaggaggaaggatggccccggctcaatgctgaagttcatcgccaagcgcctcgccaactacgtcgtcatgctgttcgtggcgatttcatgtacgtattttctggcttctggtttcatgcgtccgcgctcgaattacgagtcgaggactccccgccctccggcagcgtccatcaaccgcagcttggatctggccaatatcaatgatcacaccaatatcttcactcggtattggcgttggctgaccggtgtcgtcaccagatgggactggggactgtcccctgatctggggtcggtcaacggtgcgcttgcgccgcgtatcgttgcctccaccgagctggtgacgatcgccacagtcctttccatcgtgcttggcgtggcgctcggcatctacaccgcgcagcgccagtacaagtggcaggaccgcctgttcggcaccactgccacgttcttccttgtcatcccgaccgccgtgttcgctctgcttgtcgtgatgctcgccatcttcatcaacggcgccagcggcttccgcctgttctatgtgacgggtctgtccagttatacaggaaataactggttcctgagattggctgatttcgggcagcacatcatcctgccgaccatcgtgctgacgattctgggcatggtctcctaccatctgacgcagcgcacctacctgcttgacgagatgcacgccgattacgtgcgcaccgcccgtgcgaagggtctgacccgccgccaggccatccgtcgccacgcgttgcgcgcatccctgattccgaccgccgtcaacgtcgcattctccatcgcctcggtgttcaccggcgcggtcatcaccgaatctatcttcgccatcaacggcttgggccggtacttcatccaggccattctcgacaacgacatcaatgcctcggtcgccatcgcggcgttcggcggcgtgtgcaccctcgccggtgcgctgctggccgacatcgtgtccgcgtggcttgatccgcgcatcaagatgagctgagtgcaggggatgtgagaaacaatgactgatacaaccgtcaaaaacaacgaaacgacacagaaagagtccgacgagagcacgtcgaagggcgatatcaagcacatcggttacgccggcctgatcgcgcgtcgtttcttccgtcagcgctccgccgtggtcggactgatcatccttctggtgctggtgttcttcgcgctgttcggcgccaacatcggcaagtgggcgtatgacgaccctgacttcctcgccctgtcggcaggtccgagcgccagccactggctgggaaccgactccggcggctccgacctgtacgccatggtggtgcgtggtctcggcaagtcgctgatgatcggcatcatcacctcggtggcgacgatggcgatcgcctcgctgctgggaacggccatctccttcttcggcggctgggtcgagcgcgtcggcatgtggttgctcgatatgctgctcgtcgtgccgtcgttcctgctgatcgcaatgatcgtgcgcgccgcgaacgccaccaccggatggatctggctgatcatcggcctgaccgcgttcggctgggtcggctatgcgcgaatcatacgaacgctgacgttgtcgctgcgcgagcgcgactacgtcaaggcggcccggttcatgggcgttggatcgttcaagatcatcgtgcgtcacctcatgccgaacctcgcctcgatgatcatcatcaacacggtgctgggcgtcgtgggcgctgtcaactccgagaccgcactgtcgtaccttggtctgggcgtcaaggcgcccgacgtgtcgctgggttccatcctgcagtccggcgccgtgtccatgcagaccgctccctggctgctggtcttcccctccatcgccctggtcctgttgacgttcagcatgcagctgatcggtgacggtctgcgcgatgcgcttgatcccaattcacgtgcgagcggaacggtgggtgcctgatgttcagaaagacaatgatgaaaaacaacaagtcaaagggcagcgtctcaagcgagcacaaggagatcgtgcgcgacgacatcctccagtacgagctgcttgaaggcaacggcccaaagggtgcgccgaagggcgatccgatcatgcaggtgcgcgacctgcacgtgtccttcgccacagaggccggcgtgtgccgtgcggtgcgaggcgtcaacttcgacctgtggcgcgggcgtacgctcggcatcgtgggcgagtccggctccggcaagtccgtgaccgcgttgagcctgatcggcctgctcgacgacaacgccaaggtcaccggctccatcatcatgaacggcgaggagctcatcggcaagaccgacgaggagatgagcgagatccgcggcgagcgtatcgccatggtgttccaggatccgctgtccgccctgaccccgatgttcaccatcggcgaccagatcgccgaaggcctcatcacccatcatcccgacatgtccaagcagcagattcacgaccgttgcgtcgagctgctcgatctggtcggcatcccgcagcccgaggagcgtctcagcagcttcccgcaccagttctccggtggtatgcgtcagcgcgtgatgatcgccatcgccatcgcgaacaaccccgacgtcatcatcgccgacgagccgaccacggccctcgacgtgacgattcaggcgcagatcctcgacgttctcgccaaggcgcagaaggagaccggcgccgccgtcgtgctcatcacccacgatctgggcgtggtggccggcgcggccgacgacatcctcgtcatgtatgccggtcgtcccgtcgagcgcgccagcatcgacgacgtcttccagcacccctccatgccgtacacgatgggtctgctcggcgccgtgccgaagccgcacatcgccgcctcccagcgtctcgtgccgattcagggcaacccgccgtcactggtcgacatcccgaagggatgcccgttctcgccacgatgcccgctcgccaccccggagtgctcgctgtctgagccgaacctggaagtcgtggacgcgaactccggtcatctcgcctcctgccgtcgactgcaggagatcatcgacaagaacatgaagtacacggacgtgttccccgtgcccgacctgcttcccgccgactgggccgacgtcccgcgcgaccagcgcccggtgacgctggaggtcgaccacctggtcaagcacttcccgctgaccggtggtggcatgttccgccgtaccatcggccaggtcgcggccgtcgacgacgtgacgttcaagattcgtcagggggagaccctggcactggtcggcgagtccggctccggcaagtccaccacgctgatggagatcatgaacctcatgaagcccgaggacggacgcatcgtcgtactcggccatgacctcgccgaactcaagaagaaggcggagcgcaaggcgctgcgcaaggacctgcagatcatcttccaggatccgatgagctcgctcgacccgcgcatgcccatctatgacgtgctcgcggagccgctcaaggtgcacaagtggagcaaggagaagatcaaccgccgcatcggcgagctgatggagctggtcggcctgaaccctgactacgtggatcgcttcccggcgcagttctccggtgggcagcgtcagcgcatctccatcgcccgcgccctcgccaccgatccgaaggtgctactgctcgatgagccgatcgcgtccctcgacgtgtcgattcaggcgggcatcatcaacctgcttgaggacctgcaggccaagctgaagatctcatacctgttcgttgcgcacgatctggcggtcatccgccacatctccgaccgcgtggccgtcatgtacctcggccaggtggtcgagctcggcgagaccgaggacgtgttcacccatccgcgtcacccgtacacgcaggcgctgctgtcggccatccccgtgcccgaccccgtggtcgagcgcacccgccagcgcatcatcctcaagggagacctgccgtctccgtccgagaagcacccgggatgccgttttgcgtcccgctgccccgtcaagctgcggctcactcccgagcagcagaagatgtgcgagacgaaacgcccggttttgacgtcggatgaccagatagcgaccgaattcgcctgtcacttcccgctggatgtgaacgacgaatccgcgccgttctaaagtctttcgggccggtcatatgaccggcccgattgcattggtttcgccgaaaagtgaaaagtgacgccaatgttaacaaaacgtggtgtatcatcacggttctagttgcgagatattttgaaggagagaacggcacgcgcaactcgtgctgttcaggagaggaatgcaaagtatgagttttgcatctaccgcgcgtaaggtcaccgccttcgccgccgctgcagccacgcttctggcgcttggtgcttgcggcaacagcaacaacggcagcgccggcaacaacggcgccaagtccacttccgaaccgcaggaaggtgttcccaccaactacaccggttcgttcccgatgccggatccgggcaaggcctacaacaacccgaaggaccgcggcgagctgaagcagggtggcaccctcaccctgccgatcaccgagatcggcccgaactggaacgccattgacgtcaacggcaacaccgtgtacatgagcggcctgtggcgcttctacatgccgtgcatctgggagtacccggcggatggttccctggagaacatcaagccgaacaccaactacgtgaccaaggtcgagcagacctccgacagccctgagaccgttgtcttcacgatcaacgacaaggcctcctggaacgacggcaccccgatcacctggaaggacttcgagtccacctggaaggtccagagcggcaagagcgacaagttcaccccggccctcaccactggttacgaccagatcaagagcgtcaccaagggcgacaccgacaagcaggccgtcgtgacgttcgagaaggacttctacccctaccagtccctgttcaacctgctgtacccgtctgaagccctcaccggcgacgacaccaaggacggcgacaccttctccaagggttggtcgaacgactctcactccgacaagtggggcgccggcccgttcgtcgtctccaagagctccgactccgaagtgaccttcaccccgaacccgaagtggtggggcgacaagccgctgctggacaaggtcgtgctcaagcagatggagccgtccgctgccatgaacgccttcaagaacggtgagattgacgccgtcggcgcttccgacgccgagtccatgacgagcgcgaagaccgtgaaggacgcttacctgcgtcgttcctacgactccggtgtgtacacgctgaccatcaacaccaagaacatcccgctggaggtccgcaaggccttcgtccagggcgtcgaccgcagccagctgcagaagatcgacttccagggtatcgaatggaccgagaagaccccgggctccctgattctgcctcagttccaggacggctacgaggacaacatgcccgctgagtcgaagttctccaccgccaacgccaccaagacccttgaggacgccggctacaagaagaacagcgacggctactacgagaagggcggcaaggtcgcggccattacgtacacgacgttctccgactccgcctctaccaaggccaaggcaaccgccatccagaagatggccaagaccgtcggcatcaaggtgagcatcgacatcaaggcttcgaacaccttctccgacaccgtcagctctggtaactgggacatgatcggcctcggctggtccgctagcgacccgttcggctacgcgtcctccgcttaccagctctacggctccaagtccgagtccaacttctccttcaccggcaccgacgagatcgacaaggagctcgagtccatcccgggcatcaaggacagcaccaaggccattgctcagttcaacaaggctgagaaggaagcccagaagctgtacgctcagatcccgttcgagaacggccagatcactgtcgccgtcaagaagggtcttgcgaactacggtcctgcaggctactcctccggcgcgcgtgtcatggtgaccgttcaccccgagaacctcggctgggagaagtgagtcgtctgattcatcgatctcattgagatagcgatatagaagtcccccgtggctgcaaagtcacgggggacttcttgtatgtgtggacgatgttggaccacccccccccagccggccatgccggcagcccccgatagcggaggctgccagccgaaggctgactggaggtggtcacgctggcagagcggggttataccccgctcagcggcagaccttggagatcggctgccagggctgcagggtcaccggttcggaatccaccgcggcgagcgtgcgctcgtccaggtattccttgcggatgatgagctcctgaacatagcggtcgaaccacgcgccggaggcgacatagtagccgtccttgccgttgtccttgccccagctgttctccaccttccaacgatccggctcaccggccttgtcgaggttgacgccggtgagcgtcatggcgtggttgctgcgcgaatcgttgtattccagaccgtgcgccttgtccgatgcgaactcggtgccgaacagctcatccacgcgcacggtgccacgatcgaagatgccggccttgcgcagtgagaactgtgcgcagtcgcaggcgaaccagattgggtggcctgcggtcagctggtcaacggcggccttgcggaacacgtcgagcggcacgttgatgaagtccatcggagcggcctccgccacgttgcccacgaacgccagctgatagcggcggtaatacggggtagaggcgagcggggagttcgtcaggctcacgaaatcatccaaatcctcgcccacgtacttcgcgtagaactcctgcggcgtgatgccgtgttcgacgatctgcctgcgcgagtcgatgccggacttcgtgccggactcggacgccttggcgtcatccttggcgtcgtccttgccctcgtccttgacgcgcagcagcagatcgaagctcgtcggtggctcgcccattgcgatagcgcagatacggtacacgaccgacatctgcccggtcttgagcgagcgcagctcctcaaccgacttgccggcctgatgggcgtcgcgcaattcggcggcgaattcgcgcagcttcgtgttcaggtactgctcgaacgccgaggaatcgcgggagttcgacgactccgggtaggcctccttcggtaccagaccgtacttcttgaccagcgcgacgaacatctgccaccagccgccatcgtcagccgggccttcgttgaccgcctcgaagatgcggctgtccgtggtcttgtcgagcgtcttaagcacgttctcaaggtagaagttcgacttctccagcttgtcgtagaagaacagatagctttcggagaactcgaaatcgtcgaggttccacttgtgcatcagctcgtagcgcagcgtgttcagcgatgcgaacatccagcagcggccggaatgctcctgcgaggtgatcgacccctgcttgagttcgaccgagaacgtgcgggggagctcgcgcacgccgcgatacgaggtcgcggcctggagaatgccgttcgataccgccgcgttcgccgccacgaggttcgcgcggtccgcgttgaacgccgcggagtattccctgagctgttccgcagtcagtgccaggttgtcgggctggttggaagccatgtccatgatcctttcctattgtcggaatgaaaaactgccacgaagcagtctactccgcctacgtaggccgtgtgtgagcggggagcggaagattccggtcgaagctgcggttcgcactgtcaacgggacggatataggatggccccatgatcaccatcaccacatccaacgtgaacggcatccgcgccgccaagcgcaagggcatcgagacatgggcgggcgagcacgccccggacatctggtgcatgcaggagatccgtgccccgcaggacgagctcgatccgatattcggcgagttcgggttcgaatacgccaccgccggcaagatcgccgaccagagcgagctgacggcgatgaacgaggtctgccgcgtcaagggacgcgccggcgtcgggctgctgaccgacctgcccgtgacagcccggcgatacggtttgtccgggctggacgaggatgtggattccggccgatggatcgaggccgacgtgacgacgccacagggctatggaatcaccgtcgcatgcgtgtacgtgcacgcgggcaacagcgacgatccggtgaaaatggcgcagaaataccgcttcctcgacaccatgctcacgcgcatgggcgagctgcgggacgaggcctcgcgcggcggcaggcaggccgtgctgtgcggcgacttcaacatcgcgcacacgccgctcgacatcaagaacgccaaggccaacatcaagcatgccgggttcctgcccgccgaacgcgcctacatcgaccgctggctgggggagtacgagttcgtggacgtcatacgctcgctcgccggcgacatccaggggccgtacacgtggtggagtcagcgcggcagggcgttcgacaacaacgtcggctggcgcatcgactatcagttcgccactccggaactcgccgagacggcacgaggcttcgtcatcgacaaggcgcccagctatgacgcccgctggtccgaccatgcgccgctgaccgtcacgtatgacgtgtgatcatgcaatccatgacgcgctctgggccatgcggcggccgttcgggccggcgacaatccggcgtcgtcttccaagccaatcacaagccctagtgctacgctagtcacggttgcaacctgtacaacgaaatgaggaacccatgggactgtttggattcggcaagaagaagcgtgaacgcgaggaagccgaagcgaaggccgagaatcgcgaggacgaggccgccgtcgacactgaggagaccgccgccccgaccgacgtggcggacacgtacgaaggccgcggcgaatcctacggaccgtgggacgtcgatgacgagaacgtgccggattacgacgagtacctcgacatgggctcctactacctgccgtatctcgcgggcctgcagctgcgcatcaaggcgaaccgcagcacccaggagatcctcggcgcgaccatcagctacggcgcgtccagcctggagatcgaggcgttcgcggcgcccaagaccatgggtctgtgggacgacgtgcgcgccgatttgcttgaggccaacgagaaggcatccgaacacgcgggcgtgttcggcaccgaactccacctgccggtcaccgtcaagggcggcaagaccgtgaacacgcgcatcgtcggcgtggatggcccgcgttggatgctgcgcggcatcttctccggcaaggctgcgaacgatgacggcaactccgacaccgaagcgctcaacaagtacttcgccgacatcgtcgtggagcgcggcgacgagccgctcgccccgcgtgatctcatcccgatgcacccgccggtgacccccgcccagcgtcaggcggcggccaagaccaatgaccaggccgacgacaaggagcacctcgacaacatcccggacaagcccgaagggccgttcgactccgatcagcagaccgaggtcaagaccacgctgtcgcgtggaccgatgttctccgaagtccgctgacgaatcccggcgctcgacgccgggagccaaggaacgagcatgaccgatcagaaccagaagaaacgtacgggtatggcgtccctcgccgccgcgggcgagggggaggacttctccgtcatcgacgccatcggcgggccgcgcggcgtcatcgaatcgatgctgccgggcgtgttgttcgtcgtgttgttcgtcgtcaccagcaacctcaacctcacgatcggtgtctccgcggcgctggcggtgctgcaggtcgtcatcaggctcgtgcaacggcagtcggtcatgggcgctctcagcggcctgatcgccgtcggcatctgcttgatatgggcgtggcagagtcatgaggcgcgcaactattacatgttcggcttcctcaccaatgccgcgtacatcgtgctgctgtccttcaccttactcatccgcgtgcccggtctggggctcatggtcgagttcatccgtaccatccccaccgagcatttccgcgcgtggctgcacggctggctggacgacaagccgctcaggcgcgcctacacgatcgtcaccgtgctgtggatcggcgtgttcgcgctgcgtctcatcgtgcaggtgccgctgtacctcgccgattccgtggcgctgctgggcacggcgcgcctgctgatgggcataccgttctgggcgctggcgatatgggtgtcgtatctgatcatcgccaccccgctgcaccggcacatcgccgcggccaaagcggcggccggcggcggcaaagacggtgacagtgacggccgcaacagcggtgatgaaggtgacaacgcagccggacaggcctgatccggtcaaatcgcgaaaggaaacaatgaacgcgcaagtgcgtatcgaacgttatgccgaccagggacgatgcgtcgggcatatcgatggccgtgtggtattcgtgaggttcgccctgccgggcgagctggtgcaggtcgcattggatgaaccgcacgaccgcgacgaccgctactggaccggcgaggtcgtcgaggtcatcgaaccgagccccgatcgtgtggatcccgcatggccgctggccgggccgcttgccatgggtggtggcgtcggcggcgccgatctggtgcacgtgagcctggaagggcagcttcgctggaaggccgtcaccatcagcgatcagatgagccgtctcgggcacgtggacgtcaccgtgccggtggaacgggccgaaggcgacactgagaacggcggcttgcactggcgcacccgcatcgagatgatcgccgatgacgacggcatgccgtcgatgcgtcggcgcggctcgcacaagcgcgtgccgctggacacgatgccgctcgcgacagacaacctgcttgccgtcgccgatcgcgaacacgtgtgggatggcgggttcgaacccggatcccaaattcgcctgtctgtgcccgaaccgaggaagcagcccatcgagggcaattacgccgtgctcgtggacggcgaactgcgcgccggaaaccggcatctgatggagaccgtcaccgtgaacggccgtgacttccaatacatggtcgacgcgaacggcttctggcaggtgcaccgtcaggcgccggtcatgatcgccggccatgtgatcgacctagcgaacaaggcgcttgacggaatgacctccgcctgcatatgggacttgtattccggtgccggactgttcacgctgccgctggccacgatgaccgccgaacgcacgcgcatgctcagcgtggagggcggcaagaccgcggtgaagaacgcgcaacgcaacctccgcgcgttgaacctgcctgatgtggacgcccgttgcggcgatgtgtccgccacgctcgcgcacgtgccggcccatctgtcacgacccgatctggtcgtgctcgatcctccccgcgccggcgcgcacgccaaggtgtgccgccagatcgcgcaggcaggcgcgaaggacgtcatctatgtcgcctgtgacccgaccagcctcgcccgcgacacggcgacgctgatctcgctcgggtaccgcctgtcggacatccgggcgtacgacatctacccgatgacccaccacgtggagacggtggcctggttcacacgcatcggacggtgaggcgatgggtcgggtacgcggcgatcatgattgcgggttcctgcggcgcatgtggcgccgtgggattggcatcgcgtgcgccgcggccgcggtgatgtcgctcacctcctgcgtgccgcagggcaaggcggtcggcgatacgcaggagagcgaaccggagatcgcccatgagggcgtccaacggcaggatatcgtcgtcggcgtcatcggctccgtggacaccggcctggactctgatgtgctgaacgccttcaacaaggccgggttgaaggcgccctacgtatccaccagcatggtcgacgatccggatgccgccgcgcagcgcggagtgcggtccatggtcacgcgcaaggccaccgtcatcatgatcgacggcattgccgtcaacgagaagaacgccgaagactgggatgccgcgttgcagtccgcgcgcaaggcgggcgttcccgtcatcctcctggatccggtcgccccgcccgacgacgatacgttgttcgccgtcacgttcacgcttaccggcaagggagacggcgtgaccgccctcgacgacgccgtcgtcaccatcgtcgacgacaaaccccacccccgcacgatgaacgtcaccgacaacctgtcctgaccttccgatatccggagctcttccgcgggagcggtagtccgtattttcgccccgctggcggggctgtcgcggagcgactggggatggctcggcgtttcatcgcctgccggctattccgtctgaccgccctccggcgctgcgcgccacctcccgccggcgggaggtgtggaggcgtaggtggctgcggtgatcagccgagagccacacctcatcctgctgcgctcgatgggggacgtgtgtgaaaataccgcctgggaatgatgcccccgttatgctgccacgggtaggctagtacgtatgaatgcaaccatgaacctgcctgaagtcgaggaaaacggcctgaccgcctcgcaagtgcgcgcctgcgaggagagcggtcagacgaacgcggtgaagagcaccacgtcgcgttcggtactcgacatcgtgcgggccaacgtcttcacgctgttcaacggcatcatcttcgccgcgatggtactggtgctgatcaccgggtcatggaaggacgcggtgttcggcttcgtcatcctcatcaacaccggtatcggcatcgtcaccgagctcaaggccaagcgtacgttggatcggctgtcgattctcgtcacatcggattatgcggtgcgccgcgacggtgagaacacggaggttccttcgcgcgacatcgtactcggcgacctgctgtggatacgttccggggagcaggtgccggctgacgcgcaggtcctgtcatcatacgggctcgaactcgacgaatcgatgctgaccggcgaatcgcgcaccgtgcgcaaggaggacggcgaccaggtgtactccgggtcgacggcggtgtccggcgtggcgctcgcgcgggtgaccgcggtgggcgagcacagttacgcggcgacgttgaccgcacaggccaaggtatacaagaagacggtgtccgacctgaacaagggcatcaacacgatcctgaagttcatgacgttcctggtggtgccgctgtgcgtgctgctggtctggtcgcagatgaggaccgtgggcggatggaacgccgcgatagcttcgggggagtggcggcaagccatcgtgtcagctgtagcgggcgttgtcggcatgattcccgaaggcctggtattgctcacctcgctcaacttcgcggtcgcggcgatgcggctcgcccgcaagaacacgctcgtgcaggaactcgaatcggtggagacgctggctcgcgtggactgcctcaatctcgacaagaccggcacgatcaccgatggcggcatcatgttcgaccgtctggtcatgctggaacgcatggacggcgacgatcgcgtggagagcgcggcgacccaggcgctgtatgacctgtcgaacgaggagcagccgaacggcacgggtcaggccgtgctcgacgggctgggggaacgcggttaccatgccggcccggtgcgagcgcgcgtgccgttctcgtcggcccgcaaatggagcgccatcgtcaccccggccgcagccgcggaaacggaatcggccgccgaccgcgagccgccgaccgtctggtatatgggcgcgccggaagtgatgctctccgcgctttccggagagcacggcgatgtgctcgaagcggtcaatgattacgcgaattccggcaaccgcgtgctgctcatcgcgcgggcgacgctcatacggaagagcgacggcgatgccgcaacagattcgtcatggttcacgcagtcgcccgaactgctgccggacgccaagccggtcgcgctcgtattgtgttcggagcgcgtgcgcgacgatgcgcagcccacactggcatggttccgcgatcagggcgtgcgctgccgcatcatctccggcgacaacccggtcaccgtcggcgcgatcgcggccaaagtgcgacttacaggagaccgcgagccgcacgccatcgacgcgcgcacgctgccgcaggacatcaacgagctcgcccgcgtgctggagaacgtcgatgtgatcggccgcgtgctgcccgaccagaagaaggcgatcgtccaggcgctgcacaccagtgatcacgtggtcgccatgaccggagacggcgtcaacgattcgctcgccatcaaggaggccgatctcggcatcgcgatgggcaacgccgcgcccgccaccaaagccgtggcacaggtcgtgctcgtcgattcgaagttctcgcacctgcccgacgttgtggcccgcggccgtcaggtcatggcgaacatggagcgcgtcgccagcctgttcctcgtcaagaccgtctactcggcgctgatttcgctgggcgtggtactcaccgcgatcccgttcccgtacctgccccggcatatcacgtacgtcggcgcgctgaccatcggcatgccggcgttcatcctcgcgctcgcgccgaacacgcggcgttacatccccggcttcctgcggcgtgtcgtgtatttcgcgctgccgggaggcgtcgcgatcgcattgtccgtgctgctgtcgtcgtggctgttgcccgacgtgatgggctgggatgtgaacaacgccgccgatttgtccgcgttgcgcaccacctgcgcgatcatcgtgttcgtgctgggcgtgttcatgctcgcccgcgtggcgcagccgctcaattcgtggcgcggcgtgctggttgccgtattcgccgcggccggcgtcatcggcatgttcattccgttcgtggcgaggttcttcgacctgcatctgccgaccgggcgggtattgatcgccacggtggcggcgctgctgatttccacggccctgttcgcggtctgtcacgtcatcctcgcctcggtgacgcgaattttcccacatatcaagccgacacgccagagctaaagtaacgtatcggtatcgttggtagcggataatctcttgtggaatagcatttcatttaatctcggaggaagcatgtctgtgcgagacgaccagttggcgacactgaacgtggccggcaaggactatgactactaccgcatcgccgacctgcccggcgtcgaccatctgccgtactcgctcaaggtcctcgtcgagaacttggtacgcaacatcgacggcgcgaacatcacggacgaacacgtcaagacgctgctgaactgggccccgcaggcccagcccagccatgaaatccagttcacgccctcgcgtgtgatcatgcaggacttcaccggcgtgccctgcatcgtggacctcgccaccatgcgcgacgcggtcaaggatctcggcggcgaccctgaggtcatcaacccgcaagtccagtccgacatggtcatcgaccattccgtgcagatcgacaagtacggcgtggctgacgcggtccagcagaacatggacatcgaataccagcgcaacggcgaacgctaccagttcctgcgctggggccagcaggcgttccgcaacttccgcgtggtgccgccgggaaccggcatcattcaccaggtcaacatcgaatacctggcgaaggtcgtcatgacgaagacctccggcttggatgatggccgcgagctcgcctacctcgactcctgcgtcggcaccgactcgcacaccaccaccgagaacggcctgggcgtgctcggctggggcgtgggcggcatcgaggccgaggcggccatgctcggccagccgatctccatgctcgtgccgcgcgtcgtcggcttcaagctcaccggttcgatccccgagggcgtcaccgccaccgacgtggtcctgaccatcaccgacatgctgcgcaagcacggcgtggtcggcaagttcgtcgagttctacggcgagggcatcgcctcggtgccactggccaaccgcgccaccatcggcaacatgggacctgagttcggctccacctgcggcatcttcccgattgacggcgtcacgctcgactacctgcgtctgaccggacgttccgaggagcaagtcgcgcttgtcgaggcgtacgccaaggccaacaagctgtggggcgacgcctccgacccggactatgtcgagccgcagtactccgaatacgaggagctcgacctcggcacggtcgtgccgtccatcgccggcccgaagcgcccgcaggaccgcatcctgctgtccgaggcgaaggacatgttcgagaagaccgcgcccgcctacgagaccgacaagaccgtcaaggacccggtggccgtgtccaccgacttccgtggcgatttcgacatcgaaaacggcgacgtggccatcgcctcgatcacctcgtgcaccaacacctccaacccgtccgtgatgatcgccgccggcctgatcgcccgcaacgcgcacgccaagggattgagccccaagccgtgggtcaagacctcgctcgcccccggctcgcaggtcgtggccgactacctcaaggccgcgggcctccaggacgatctcgacgcgctcggctaccagctggtcggcttcggctgcgccacctgcatcggcaactccggaccgctgctgcccgagatctccgaagccatcaacgccaacgacctgaccgtcaccgccgtgctgtccggaaaccgcaacttcgaaggccgcatcagcccggacgtcaagatgaactacctggcctccccgccgctggtcatcgcctatgcgctcgccggcacgatggacttcgacttcgagacccagccgctcggtaccgacgcagacggcaatgacgtgtatctgaaggacatctggccgaccaacgaggaggtcgcggccgtggttgacggtaccgtcagccgcgagatgttcctcaaggactacgcctccgtgttcgacggcgaccaccgctggaagggcctcgacgtgcccgaaggcgagctgttcgcatgggacgagcattcgacgtacgtgcgcaagcagaccttcttcgacggcatgaaggccacgccggagccagtcgccgacatccacggcgcccgcgtgctggcgttgctcggcgactcggtcaccaccgaccacatttccccggcgggcgcgttcaaggcgtccagcccggccggcaagtacctgaccgagcgcggcgtggagccgaagaacttcaactcctatggctcgcgtcgaggcaaccacgagattatggtgcgtggtaccttcggcaacatccgcctgcgcaaccagctgctcgcctccgtcggcgaggaggtcacgccgggcgggttcacctacgatttcacgactggaaagccttcgacgatctttgacgcctcgctcaactacaaggccgccgatattccgctcgtcgtgctggccggcaaggagtacggcactggctcgtcgcgtgactgggccgccaagggtacggtgatgctcggcgtcaaggccgtcatcaccgagagcttcgagcgcatccaccgttccaacctcatcggcatgggcgtgctgccattgcagttcccggcgggggagtcctatgagtccctgggtcttgacggcaccgagacctacgacatcgccggcgtggacgagctcaacagcggcgtcaccccgaagaccgtgcacgtcaccgccacgcacaccgacggctccaccaccgagttcgacgcggtggtccgcatcgatacgcccggagaggcggactactatcgcaacggcggcatccttcagtacgtcctgcgcaacctcatgaagtaagcggcccgaagtcccttgaccccatggtcaagggacctctttattctcttttctcttttcttcctttcttcttcctccctttcccctttcttcccctccttctcttcctttaccttttccctcttcctttcctctttccgggagttatccacaggcgcgacacgcccggactgcattgcacaatcctcggtagcatctccatagaacggctgtattgcaatggttcgacaacgtggcatgactattgtgcggcgcagtccgggcgtgtcacgatcgagccttcgaccacattgcccgaaaacctgaagaccgggccggaaaacctgttaccgttcgtccgtgtttgagatgcgaaacgaaccgccaccgaaccaatacatgcggcatcaggcgtggctcatccagcgctattacctgaagcgttgccgggcggtcagggatacgctggagcatgagccggtattcgcgttgtcgtcggcgctggggctgatgggcattgcaccacccgagaccgccgtccttgatttgggcaaggaacatatcgtcgttcggaatcgtgacgcgcgacgcggtcatcccgccaatgtcgcatgtcatgcgtggtcattgctggacgaccgtatcgtaatccgcatctttgatctgtactgcacgtcacccgccgcgacgttcgcccaattcgtgcggttcaactggttcgaggaaacaatcatattggcggatcggctgacatgccgtgacgagcggctgaggcgcgcgaccaaacaggaactgatggatttccttgatgagcggaaggtctatggcggcaaggccgcacgccgggcgttgcgtttgtctcgtcctaacaccgattcccggtgggaacgggagctgcgtctggatgcgatgaaatggggattgccgaatccggaggcgaaccatccggtcgatttggggtctggattggcatggcttgacatggcatacgagaagtatcgcgtggcgatggaatttcatgggcagcagcatctggaacagtatgtagcggacacgaggcgcatgaacgcattggcggccaagaattgggtggtgcttccggcctggcagagtacggtgcttgaccaggccgaactgcatcgatacttcagtcaggtggccgccgctttggagcatgccggtgccgtcgattttctgcatccgcgcatggatctgtggacgttgagcggcaatccggagctgctggaaccgttttgacgtaggagcgaccgattggtatatggtccgagacagggatggcagtcgtcgtgatacgacacgcccggagtgcgcagcacgaccgccgaatagtcgctgcgaggtaacggtataaacccgttctggactccggacacaacgattgtgctgcgcaatccgggcgtgtcgtgttatgggaacaccggtgtatcgaggaaagagggaaacttgaagagagaaagtcgggaacaacagttgagggggcatagaacagatggaagagagacggccggcaggatgtgggagaagtcctcggaacgggataaagaagaaccgtttcgcttacgccggcgaaacggttctcgagcagtgacggacgatcccgtcacgcgaggccggagagcttgttgatgagctcggggtctcgcgtggcgcccttgtcggcggagcgcgcgaaggcggcgtacgccttgagggcctggctcaccttgcggtcgcggtgcgccacgtagccatcgccggcctccagttcgcggcggcgctcggccagctgctcgtcggtcagctcgacgttcacggaacgggcctcgatgtcgatgtcgatgatgtcgccgttcttgatgagcgccaccgggcccttgttcgccgcctcgggagccatgtgcccgatggccagacccgaggagccgccggagtagcgaccgtcggtgagcatggcgacctgcttgccgatgcccttgcccttaacgaaggacgtcgggtacagcatctcctgcatgcccgggccgcccttcggaccttcgtaacgaatcaccagcgccatgccgggcttcagcgtgtcgtcgaggatcacctcgatggcctgctcctgcgaatcgaccaccagtgccggtccgcggaacttccagatctcctgcggcacgcccgcggtcttgacgacgcagccgtcgggagcgaggttgccgcgcagcacggcgagaccgccctcgtggatctccggatggtcgatgtcgtggatggcgccgttggcgcggtcgcggtccagcgagtcgaacagcgtggtgtgcgtccacggttcgggagagatgatgtggccgggagccgccttgtacatctgctgggcttcttcggtgcaggtgggacgcatgatgtcccagtccgccagcttggcttccagcgtcgggtagtcgatggagtgcacgttggtgtgcagcttgccggcgcggtcgagctcgccgaggatgccggtgatgccgccagcgcggtgaatgtcggagatctcccacttgccggacggcgacgccttgcagatacacggcacggtgtgcgagatgcgctcgatgtcgtcaagcgtgaagtccacgtcggcggactgcgccatggcgaggatgtgcagcacggtgttggtggaaccgcccatagcgacgtccatggtcatggcgttctcgaacgcctccttggtggcgatggagcgcggcagtacggagtcgtcggagtcgtcatagtactggtgggcgatcttgacgacctgctgcgcggcgcgcttgaacaggtccttgcggtaggaatgggaggcgaggatcgtgccgttgccgggcagcgccaagccgatggcctcggtcaggcagttcatcgagttggcggtgaacatgccggcgcaggagccgcaggtcgggcagacggtcttctcgtagttgagcagctcctcgtcggagacggaatcgtcggcggtggcgtacatcacgtcgatgaggtcggtgctcttcttggtgccgtcggcgaggatcgtggtgccggcctccatcgggccgccggagacgaacacggtggggatgttgaggcgcagcgcagccatgagcatgccggggacgaccttgtcgcagttcgggatgcagatcagtgcgtcggcgcagtgcgcgttgcactggtattcgacggtgtcggcgatgatgtcgcggctgggcagggagtacagcatgccggtgtggcccatggcgatgccgtcgtcgacggccatggtgttgaactcgcgcgggatgccgccggcctccttgatggcctcggagacgatgcggccgaccttgttgaggtggacgtggccgggcagaaactcgtcgaacgagttggcgatggcgatgatgggcttcttgcccatgtcgtcacctttgacgccagctgcacggtagagggctcgggcacctgcgaagacgcgcccgttcatgatttttgcagatcgcatttcagtcatggttctattcaagctcttgcaagggacacgcgacatgtcaagagtcggaatatggaattttcataagtgttacaaaactcacagtggattaagcctatgtagccttttatgttgtctgcaagtcggcaacgaactggcagaatccaccggacccgctccggtcgctgcgtgaggctataattgctgcggttgagatagatttccatcatgtgattcggagacttgcaaaaatggcagaagaaaccaaggataccgaggtcaagggcaacgaggagttcggcaccgcgcccgtgcccgagggtttcgcgaacccgccgatcgacgatctgatgaagcacgccgattccaagtacgcgctggccatcttcgccgccaagcgcgcccgtcagatcaactcgtacttcacccagctcaacgagggcctgctgcagaacgtcggcccgctggtcgaataccagaaccaggagaagccgctgtcgatcgctttccgcgagatcgacgagggcctgctggaggagactctgggcgaggatgatctgagcgaaggcaactgattcgtctgaatccgtccggttcgctgtacgcggtatttgctttttctggggcgacactcttgcccttgacggcggtgacgtgtacaactgagcgtcaggagcgaacgacttggggctcgcgccgaccgaaggtctggcacgggcccttttcgtagcctgttcaggtcctgcaacaacagaatgaaccaacgtatcattgtgccttatccgcaaaaggcgggtagggcgataagtccgaaagagggatgatatgaccaatcaggagcgcaagctcatctcggccgaatctgtgaccgaaggccaccccgacaaggtatgcgaccagatttccgacgaaatcctcgacgaactgcttcggcaggatccgcagtcgcacgtcgccgtcgagacctccgccgcgaccggtgtgttcctcgtgttcggtgaggtgacatcaaaggggtatgtcgacgtccagtccaccgtgcgcgagacgctgcgccgcatcggctacacgtcttctgaggtcggtctcgacgccgactcctgcggcgtgatcgtcgccatcaccggccagagcgccgagatcaatcagggtgtggcgcgcctcaccggcgagaaggagaccgaggccagccgcgaggagcggtacgaggcccagggcgccggcgaccagggcgtgatgttcggttacgccaccgacgagaccgacgtgctgatgccgctgccgatctatctggcccaccgtctggccttccgcctgaccgaagtgcgcaagtccggcgaagtgccgcacctgcgcccggacggcaagacccaggtgaccatcgaatacgacgagaacgacaagccgttgcgcgtcgacaccgtgctgatctccacgcagcacgacccggaggcgagccgggaatggctggccgcccagctcaaggagcatgtcatcgacccggtgctggacgaggtgctcggcgacggcgtcaagcatgacgattaccgtcagctcgtcaacccgaccggctcgttcgtcctcggaggtccggccgccgacgccggcctgaccggccgcaagatcatcgtcgacacgtacggcggcgccgcccaccatggcggcggcgcgttcagcggcaaggacccgtccaaggtcgaccgttccgccgcgtacgcgacccgctgggtggcgaagaacatcgtcgccgcggggctggcgcaccgtgtcgagctgcaggtcgcctacgcgattggcgtggccgaaccggtgtcggtcaacgtcgagacgttcggcaccgaaatcggcgtgacccgcgagcagatccagcaggccgtgcgcaaggtgttcgacctgcgtcccgccgcgatcatcgacgagcttgacctcaagcgcccgatttacgcgaagaccgccgcatacggccacttcggccgcgtcgacgtcgagttcccgtgggagcgcaccgacaaggtcgaagagctcaaggccgccatacgctgactggcagatcacaacgatcaccctcggtttcacttcgtaacgtccccgccagcgggggctgccgcgaagcgaaaccgggggtggtcttgtctatacacacaacatgcatacacaaaaaagccgccggacaccccgagaaggttgccgcctgcggcggacttcaccggtggcgtgatacaaatgaaccatgagtacgaatgacgcgcagcagttggcgtttgacggcatggcgccgcgcaaacgccgcaagcgcgcgcctgccgagaagattgtggccgcggaagacccgatcgcgcaggtggtgctggacgtgcaggcgacccatctgggccagacattcgactatctcgtggaggagcggtggtcgcagaccgcacggcccggcgtcatggtgcgggtccggttcgggggcaggctcctcaacggcgtgatctggaagcgcacggcagccagcgccacgccccgctccgcgctgagatttcttgaacgggtgatcagcccgcacgtgctggtatccgaatccatgcgcgacgatatcacgcgcatcgccgacgcctatggcggcacgcgggccaacatacttcgcctggcggtccccccgcgcgtggcgcgcatcgacggcgaacagcaactggccgcgcgttcgctatgggtgggaaggctcagattctcgcacgtctcggacgaactgatgcaacggtgcttcgacacgatacaggcttcatatgacggcgccgccatgctgcgctcatccctggagggcagctcgttcgccgccctggtgatggatgcgcgtccgggagcgcgtgcgtgggctcgtgacgccgcgtggatgatcgctgccgcgatgaggcagaaccgtgccgccgtggtggtcctgcccgggataagacagtgcgaggatctcgccgttgccctggagggactgggactgtcccgtttcgcgccgggcggcgccgagcacggcggatactccggtgacttcgtcgtgctggccgcaggactgccgccggcggaacggtaccgtgcctatctggcggcggcgaccggtcaggtcgggtgcgtcatcggactgcgtgccgccatgtatgctccggtcgaggggccggccctgttcatgatggtggatgatgccgcgtaccagcaggccgacgggatgatgccgtacgcgcaggcacgcggcgtcatgcgtctgcgcgccgagtcgcacgggggagtgtttgtggcgctgtcgtacgcccgtagcccgttgagccaatgggaatgcgaggaccacacggccgtgactgccgtgagcggcccgagcgcatccgtcacgccgttgccagccgctcgcagggatcagatgccgtgggtgcggtggctgaaccgcgaggagctggcgcgtctcgccgacccgagcataggcgcccgcgtgccgcatactgcggtgacggtgttgtcgaaggccttgcagacagggccagtgctgctgtccatcccctcggacggcatgcaggaggcgttgagctgcgtgaaatgccatgcgcaggctcgttgcgcgaaatgcaccggcccgctggggcgcatgggtgatggggtgccgcgctgccggtggtgcgctgcggcggcggtcgactggcattgcccgcattgcggctgcgagcgcatgcgcgtgatacgggttggcgcaaccggcaccgcccgcgagctgggcggcctgttccgcggtgtgtccgtcgtcatatcgtctccgagccagccgcgaggcgtcgtcgagtacgtggatgatgcgccgcgcatcgtcatcgccacgccgggagcggagccccgcgtgctgcctgcatcccgtcaatcggagcaggatgccggcgaataccgtgccgtggcgatcctggacgcgtggaacagtctgtatgcgccgggtgtggacgcccgcgtggacgcgctgacggcgtggatgcgggtcatggcgttgtgtgcgccccgcactcgtggcggacagggtctgctgattggtgaatgcgatcctgcagtggcccatgcgctgatgatgtgggattcggcgtcgctcgcccggaacgaattgctggagcgtgggcagaccggcatgcctccggtgtgcgcggtcgcatgcgtatgggggcgtcgggatgcggtgatggccgccttggacgatatcggcgtgctgcgcggcgattgggtctcgctggatgttgcgggggagccgatacccggcatgctggggccggtgccgatagcggctccggtgacggtgagcgaacgcgagctggagagcacgcaggaccgggtcaaggccctggtccgtgtgccggtcggcatgcgtgcccaattggccgtccgtctgcggtccgcggtggcgcgtcacatggcgtcgcgcactcccggcgaactgcggttccaaatcgatcccaaggatttgatctgatccgagagattatccgccgcgtcgaggtgtcgtttcgaggaaagcggcggtgtgacatgtctgactgccgattgaatcagcattcggaaccttttgtttcggttggtgagatgagatggggattccttgccacgaaacgtcaaaaatcgctgttttcggcattcggtccacttcttgtgccacaagatcggatttaaccggttacatgccgtttcgagccatgagaccgaaactgggaatcattggaaaatggcgattctgttattcggagcggatttttcgtgtcggtcgtgtggcacgaaatgtcgagaacgcttgtttttcgcatctcgtggcaatgtattcggtcgagaaatgcatttcacctgtgtgcaaaaccactcgggacataccggaacgtgtggtcgtggaacggcttcgattacataaaacaacatgcgaccgaaaggcggaatcgttttgaccaggccgtcactgcatccggtgccaccatgcaggccgggcctgattcactggcggagaccaaaacggccggcaagtcgcggaaggattcctctttccgagaatgctctagctcagacgggtgctggcacggcgaccgttgtcttgctcacggcgattatggcgctgatggatgtcggcgtatatgacatttgccgcgtagattcggggctgccgaaacgattcggacgaaagctttcagacgcggcgcttatagttgcatgccggaatgcatcggtgcggcggatgattcgccgcgtcgtctcgatggcatggaaccatggatgtgcgcggccgcgcgccgcggaatcgttcattggaatcgttcatatggatggaggcatcatgaagggttggccgggcgaaccggatatggaacatgacgtgctggtggcgcagggacccgccgcggccgccgacggcaagccgatcagcaacgtgattttcgatttcggcaacgtgctgatctactgggatccgtccgtcgtgctgctgcccaggtattcgcaggagaccatcgaccagttcctcgacaatgacatctccggcttctacgacgcgaacgaccgcatggacggcggcgcaagccccgacgagggcgtggcgtggatgcgcgagcattacggcgacaagtgggcggatatcctgcgctactatctcgacaatttcgaggattccctgaccggcgtcgtgccgggtgcccgcgtgctcgtcaacgatctgaaggccgccggcattggagtatggggcctgtcgaactgggagaaggaactgttcccgatcgcgctgaagcactgcgagatcctgcagcggctcgacggccgtctggtgtcggggtacgtgcacatgcgcaagccgcacaaggacatctacgagaaggccttggaggagttcggcatcagcgccgaaagcagcgtattcatcgatgacaaggcgatgaacatcgcgggcgcgaacgaggccggcatccgcggcattcgcttctcggacgcccgcaagctgcgcgagctgctgatcgagcagggcatcgatatcccggcggttcagtgacctccgcccgtccgcacgtcgtccggcgttcgacgatgatgacagggcagatggcctgaagtcccaataccgtggaaggaaacggaacacatgttgaaaatcctctttgccggcacgcctgatgtcgcggtgccgtccctgcgcgccctcgccgcggacagcgagcacttcgaagtggtcgcagtgctcacccgcccggacgcgcccaccggacgcggacgcaagctcacgcccagcccggtcaagactgccgcgctggaactgggattgccggtactggaatccgacccggccgagccgacgttccttgacgagctgaaggtcaccggcgcacaggccgccgcggtcatcgcatacggacgaatcctgaagcagtccgtgctggacgcgctgccctgcggctggtacaacctgcatttctcgctgctgccgcattggcgtggcgcggcccccgtgcaacgagccatctggtcgggcgacgatatgaccggcaccagcgtgttccgcatcacgcgagcgatggatgccggcccgctgctggtgcaatccgaaacgccgatcggcgagcatgagaccgccggcgacctgctgacccgtctgggagaatccggagcgctggtgctgcgcgacgcgctgcgcaccgtcgaggacggtaccgccgatcccgtggaacaggcggaaggcgattacccggtggcggagaagatccgcgtcaacgacgcgcatatcgatttcagtgcgccggtggaagcggtcgaccgtcagattcgcgcgtgcacgccgaatcccggggcatggaccgaactggatgcaggcggtctcgggctcgacgacgggctgtccacgctgcacgtgctgcgggcgcacccggccgatatgaccaatccgaacgtacccgggtcgttggggtctggggcgctcgcagctggaaagaagaatgtctggatcggcacaggctccacacctctggaattgctggaggtcaaggcgcagggcaagaaggcgatgcgcgccgccgactgggcgcgaggagcccgactctccgaagccgcgcgctgccggtaacgaggtgcgcgttgcagactggaggtaagtgaaaccacccccagtctcgctgtcgctcgccctcgcctacaaatggccctgccctttgctttacggctcggcccgccagcggggcaattatcacgctcccgctggagggagctgtcgcgaagcgactgagggtggtcttggcgctatcgccgtgcgacgtcagcgcaggaagtccagcaccttggtcaggtcgcgctcgttgatggactcgtgggcggcgagctgagtcttcggcttggcgcagaaggcgatgccgagcccggccgcctgaatcatcgggatgtcgttcgcgccgtcgccgaccgccacggtctggctcatgggaaccccgtctcgggcggcccacgcctgcaatgcatgcagtttcaccgtcttgcacacgatattgcccagcaccttgccggtcagcgcgccatccaccacttccagacggttcgccagccaatggtcgatatgcccttcggcggcgagacggtcaacgacctcatggaatcccccggacacgacgccgaccttccaaccatgacggtgaagctcgtcgatcagcgccaacgcgccattggtgaagtgcagcttgtcatgcacggtgtcgaacacgctcacgggcagtcccttgagcaatgcgacacgctcacgcagcgcatcacagaattcgatttccccgcgcatggcacgttcggtgatcttcgctatctcgtcgccgctgccggccgcctcgccgagctcgtcgatgacttcctcgtcgatcagcgtggaatccacatccatgacaagcagaccaggcttcgacagcgtcggcgcggccgcggtgccgtcacccatggtgtccgagggcgattggtgcgcggccgcgaacacctccacgtcaggcacgtcatacgattcgtcagaaggttgcaaagtttcgtcaagcataccgtcgattgtcggaaatcgttgggacaataccggtatgcatgaatccctgcgcatatcggccttcgcgcccgctgcggtgcacggagcgggcgactccggctccgctgtcggcgccatttccaaggtcattgtggccgtcgcggacccggcgattcgccgggcgcgtaatctgatagggaagcgtgctcgaaaaaggggcgaacagtgaacgatatcatgcacgacggcactccggatggcatatggaactcgcaggaccatccgtcaggcctacctgattcagggccggtctcatcgtcgggcacgggtgccgaaagcgccacggcacgacaggacgcgaggaagatacgggagaacgtcgcacgtgagctggcggccgccaatgaccagctgatggccaagaaccatgcgctcgcgcaggcgctgtcgcgcgcgggcaaggaactcaccaaggcgaaggcgcagctgtcgcagatggcccagcccccgaagaccttcgcgacgatggtcaaggtcgactcgtcgatgaccgacgagctcggtgtccagcatgcgtcggccgagatcctgacgggcggcaggcggctggtcgtgcctgtggccgccaacgtcaacgcgtcccggctgacggccggcgcctgcgtgctgctcaacgagaacatggtattggtcgagcagcgcggcacggacatgctcggctctgtccgcacgatccgccaggtgcttgatgacgggcgtctgatcgtcgcggatggcggcggcaaccccagcgtgatccggcgctcgggagcgttggcgcacaagacgttcgccaacgggcagcgcgtcatcgtcgacccgtcgggccggctcgccctggaactgctgcctgacgagaacgatgccgacctggtgctggaggaggttcccgatgtcaccttcgccgacatcggcgggcttgacagccagatcgaacgcatccgggacgccgtgcagctgccgttccttcaccgcggcctgtacgaacggtacaatctcaaggcgcccaagggcgtgctgctgtacggccctcccggcaacggcaagaccatgatcgccaaggccgtcgcccatgcgctttcggatggtttcggcaggggcagcggcgtgttcctctcggtcaagggtccggaactgctcaacaagttcgtcggtgaatccgagcgtctggtgcgtcagatcttcacccgcgcgcgcgaacgcgccgcggacggccggccggtcatcgtgttcatcgatgagatggattcgctgctgcgcacccgtggcaccggcgtctccagcgacgtggagaccacgatcgtgccgcagttcctctccgaactcgacggcgtggagagcctcgacaacgttatggtgatcggcgcctcgaaccgcgtggacatgatcgaccccgccgtgctccgcccgggacgactggacgtgaagatccgcgtggaccgccccggggcggatcaggcggcatccatcattcgccactatctgaccgacgacctgcccctgcagcccggactggacgccgacggcctgtcgcgcgttctggtgcgcgacatctacacgcgctcgtcgcgacggcacctgtgcgacgcgtgcaacgaccaggggcaatggtcggccatcttcctctccgacgtcgcgtccggtgccatgctcaagaacatcgtcgaccgcgccaagacgaaggcggtgaaggcgtccattctcggcggcgacgacgtggcgttgaacgtcgagctgctgggagaggccgtggaggacgagttcgtggagacacgagggtcggtaatggacgtcgatccggtgcaatggtcgagaatcaacggcatggacaacgggcgcgtggtccgtatccgtccggttccacgcaaggaaaaggagaacatgcaatgaccgtgcgacgggtgatgggcacggagaccgaatacgcggtctcggcgcccgctgtctcacatgccaatccggtgcagctgtcgttcgacgtaatcggcgctgccgccgaccccgaacgttcacgcatacgctgggactatcgtcaggaggaccccgtcaacgacgcgcggggcacccgtctggagagggccgcggcccgccccgacatgcttaccgacgagccgcagctcaacatcgtcaacgtcatcgcccccaacggcggccgcatgtacgtagaccacgcgcaccccgaatactcggcgccggagaccaccgacccgttcgaggcggtgcggtacgaccatgccggtgacctgctgatgcggcgggcggccgcgtcggcgagcgcgagaacggggcacgacatcgtcctgcaccgcaacaacgtcgacggcaagggcgccagctggggcacccatgagaactacatgatgctcagatcggtgccgttcgacacggtggcggcgctgatgaccgcccatttcgtctcacggcagatatacgccggatccggccgcgtcggcataggggagcgcagcgagaccgccggataccagctcagccagcgtgccgactacatccacgcgatcctcggactgcagaccaccttcgaacgccccatcgtcaacacgcgcgacgaatcccacagcccatccgattatcgtcgcctgcacgtgatcgtcggcgacgccaaccgcatggacgtgccgcagacgctcaagctgggcgccaccagcatgctgctgtggctggccgagcacgcggacgagaccggctatgatctggcagcgctgctggactccatggcgctcgtcgaccccgtgtcggccatgcacacggtgtcgcacgacttgacgctgcaggccgagctgccgctgcgcgacgggggcgtcaccaacgcgtggatcatgcaggtgaggctgcgggccgccgtgtacgagatgggggcgctggtgtacggcaccgacacgcgcggcgagccgctgtggccggacaagcccaccaccggcatcatggcgctgtgggggcaggcactcgccgacgtggccgccatccggcatgccgacgacgatacgagactgaatatgcaacccgaggcgtcgcgggtggaatggctgatgaaatggcagctgctggagcgtctgcgccgcaggcacggtttgtcgtggaacgatccgaaactgcgggcgatcgacttggggtgggccgccttggacccggtccgctcgatattcgagaaggtcaggtcgcgcaccgagcgcacggtcgacgaccggcaggtcgccgatgccgctggcaatgcgccgcagaccacgcgcgcatggctgcgtgccgcggtcgtgaaccggtatgcgagccaggtggtcgctgtctcatggtcccatctgaccgtccgcaggcatgatgcgccgcagacgggggaggagtcgtacggcaatgcgagccgtccgatcgtccggccgtccgacctgtgctcgctcgacatgtccgatccgtgcgccttcgacaaggcgcacatggccgcgttcgtggacggcacgcgaaacgccgatgagctgataacgcaaatcgatcggaacatcaccgccggaaggtaatatcgatacaggcatgaaatggcattaccgtgggcgcaccactggccgatgcgcatcatggggcagccatgatggcgagcgatgacgatcaaaggcgcgaacgccacgaccagagacaacgaccgacagacgaggttgatacagacatggatttgcgagaaatgacacaggccgtcgcccaagtggcgcggcatgccggcaggcacgcccttcaggagcaggtgaacccccacgacctatccacgacgatggtgtcgcccggcgagacgaaattcaccagcgaggtcaacacccggctgattcgctatacccgcgcgcgactgtccgaaatcgaaccgttccagggcttctgggaggagcgtccggaggacaaccagccgggggagaggtactggtgcgtcggcaatatcgacggagccatcaatttcatccgcaacatggccgaatggaccgtgaccatctcactgttcgagttcgacgagcactgccatgcgcgcccgatcatgggtgtggtccatgcgcccgccatgggcatcacgtacatggcggcgaagggccagggtgccatcaggatacgccgcaaccccgtgggcggcgacaagcgcgagaaggtcatgccgtcgatcactgcgacgctggatggctccgtggtcagctacggcatgtcgtatgtgccggaggagtccaagcgggccctgtccgcggtagcctccatcgcgggtaaaccggccgatatcaagcgagtgggtccggcttcgatggatttgtgcaaggtggccgacggcacgtacgacgcctatttcgagcctcacctgcacaagtgggatgttccggccgtctcggccggcgccgtcgtggtatgggaggcgcaggggcgtctgagacagtggaacggcgagctgatccattggcgtcgcgagaacgatgtcgtggcgtcgaacggcctgatcggcgacgagctgcagccgtatctgcagtgatcgggcgcatacagacatatgcaggcgtctgccggcggtgacgaatacgtgcgtgcgtggcagatgtctgcgattcggtgacggcatgccggatgtccggcctgtgccggcatcggcggaagaagaaaaccggaaggaaagggaggtacggatatgcctcaggaattcgctcacacgcagtcgtcctcgccgaagcaggacaccgacgaacagctgaatgacgtgtcgatggcggcacaggccgagaccgacgcggccgtggacgctctcgacgcggtgctggatgacatcgaatccacgctggaatccaacgccgaggagtacgtgaacagcttcgtgcaaaaaggcggcgaatgatgccgcagctgcgtgacagcggcaatcacgggagttggcaggaagcgcggaggtcttcgcagttccagggattcgcccgcattttcggcgtggagacggagtacggcgtatcggtgacgggttcggaccatccggtcgacgcggcgcaggtcgcgatgatgatgttccagcctgtcgtgtcccgcgcgcgttccacgaacacgtacctgaccaatggttcgcggctgtatctcgacgtcggctcccacccggagtatgcgaccgccgaggcccgcgatccgatggacgccttgctgcaggatctggcgggggagcgggtcatggccggattggccctcgacgcgcaggcccggcttcgtgccaggtacggggacggcgtgaacgtgcacgtgttcaagaacaacgcggactcggcgggccactcgttcgggtgtcacgagaactatctcgtacgccgatatgtgcctctggaaaccgtcgagcacgagctgctgccgttcctgataacgaggcagctgtacaccggagccgggcgagtcaccgatcagggattcgagatcacgcagcgggcggactatctggatgaggcggtgtcatcggcgacgacgcggtcgcgccccatggtcaacacgcgtgacgaaccgcactcggatccggatgaattccgccggctgcatgtcatcatcggcgactccaatcgttcgcaatgggcgacatggatgaaactcgccgtgacgcatctgattatctgcgtcatcgaggaggccgcccggctcggtgaggattccggtttcgcgtcgtgcgcgttggccgatcccggtgccgcgaaccgtgcggtcagcgccgatctgacatgcgtgaccgcccggcttcgtcttgctgacggctccgagccggtgtccgccgtgcagatgcagcgcaggtaccaggccgtcgttcgtgatttcatggaacgtcatcatgatgccgttgacgacgcactgccgcgcacggacgtggatcagattctttccgcatggtcgctggttcttgaccagttggaggccagcgatgtggaagcattgtcggaccgcgtcgactgggcggcgaaataccgcctgttccaggcgctgaaacgccgcaagggcgaagtgacggacgccatgcgcgaacggctggacatggattaccatgacatcgtcaacggttcgctgtatccgtcaatgctgcgtcgaggcgtgatgcggcagctggccacgccccagcaggtggagcatgccgtctcggaaccgccggccgatacccgtgccgcgttgcgcggggccttcgtcgccaaggcgctgtccacgcaatgccggttctcctgcgactggacgcgattgtccgtcatggctcctgaacgcagcgaagtcgtgctgctggaccccttcgaatatcaggcgaatgccgacgtccaacacctgatgaacctgctataacgccccgctggcggctgagccgtcggcgaagtcgaccgggggcgccgaccggaggcgccccagcccaagcccagatacggaaaagcccctgactcttcattggtcaggggctgtatttgttcaccatgataacgaaatcggtgacaatggcacgaaccggacttactcggtcacggccttcttcagcagggagccggcggagatgcgcacgccgtaggtcgccgggatctcgatgatttcgccggtgcgcgggttgcggccggtgcgggcagcgcgcttgacgcgctcagcggagaacaggccggtgagcttcaggccttcgccggactgcatggcctcgacgaacacgtcctggaaagcgttaacggcggcctcagcctgagccttggtcagattggacttctgggcgatcttcgaaacgagatcagacttgttgtatgccataaagcatccttctttgatctgggggcttcgattgccgaatccccggtgttcatcaatgatgatagcgcatgatgtaggcaaacgccgcattttttaagggttttccacactttttccggttgttgggcggttatatgagattgtgtttgtcgagccagcgcatggacagagcaccgagggggattcgcagccagtagaacagcgcacggtacagcaacgtcgcggagagcgcgatgcccgcgggcacgcctgccgcgccgaacgagaacgtcagcgccgcttcgacgccaccgaggccgccgggggtcggcaccgcggagccgatggcattggcgaccaggaagatgaacagcgtctccagcggattggtcatctgtccgaacgccagcagcgccgcccagaattccagtccggtggccacgttgaggatcagcatgcccagcacgctgaacgacagctccttgggattggtgagcacgtcgatcagctgccgtgcgtaggccttgaccaggggcagcagcctgtccgtcgcgtaatgccggatgggtgggatcatcatcgccacggcaagcgccatcagcacgatgccgacgatgacgatcagggtgttcgtcggaatcatgctgctaagcgcgtcgctgcctgtgaatatgccgatgacgaacagcatgagcactgtgccgccataatacacggccatgacggcgctcatgatcgcggtggcggtcgtattgcggtagccgcttttgcgcaggaactgcaggttcacgaatgcgggtccgacgccggcgggcatggacaccatcgcgaatccttgcgcgacctgtgacatgaagatgccgagcgggttgcgcttgtcgcgttcgatgaaggccccgagctccagcgcggagccgagcagggcgatgagttcgaagaccaggcagacgatcgccatcaccgggttggcgttcttcaccgcggagatgacctcgtcgggcttcagttgggtgaagatcaccacgacggcgacgatcagcagcaccatgccgatgaaggagcgcgggctgaaccgggacagggacaccggctccatggcctcggcggtctcctgcggggccagcgcgcgcatctcggcgcgcatgtcgtccacgatgtgcttgttccagcccggcagggcccgcgtgccggcgggaacggccgccttctggatgaatggggtcagcgagatcatcgtgtcgtcgccgagtacgtcacggcctgcggtgaccgcgcgttcggggccgatgagcacggcgagcagcaacagcagttgcacctgatccagtgcgatgttcggggccgcgctggcgtcatccccgttctgccatccggctatgatcggcgtgccggattccagtcgcgcgagggtgtccggcgtgatgcggcgatgcgtgtacccgcgcttgttcgccaccgacaggaaacgcagcaatgcgatggcgtccttgtcggacaacgtgttgaggttgcactcgtgcatgatgtcgtcgccgtgcagcaccaggatcgaagtctcgccggtgtcggccacgccgtagaccttgggggtgggcaggcccgcattgcgcaatcccagaatcatcgccatatggtgctgggtcgcctctctcggcgagcggtcgcgccgcatggcgacgccggtgaaccggacccactgccacagctgtttgacgtagcccgccgtgcgcgcctggctgtccagagcggagacgacgaaggcccgtccccaatcatccacggcgtcgtacagtcgagatccttcgaccagatcgtcgtcgagggtcgaggcgagggagccatgggacaggtcgacgtccatgcggcgcttcagcgaggtgatatgcagtccgatgccgttgagcgcctgcacgagatcctcgccccatgcgccctggttcttggtgccggctgcgaaccggatcagcatgccgaccagccggcctacggacagggacacgataactccggtcacggagttgatcgacagcaggatcaggatggccgacgagatgtagaggatgttccatccccatttgaccgtcgatcgtgtacgccgaggccccgcgacggtcaacaatgccgcggaacccgcgtagaagtccggcagcagtcccgttccgatgatcgagcttggcgaacacagcgcggtgataagtgtgaagttcccgaaggtcgacacggccatcgatatgccccagacggtcgctaggccaccgaacatggcgagtagggccaacgccgattgcagccactcccgtcccaccagcagctggacgatggccataacggcgatggtcacgatggtcagctgctgcagcatcgaggtcggaagatcgaccatccagttcagtgcacgtccggcgctgtgggcatcggactcgactcccgtgacgaaaccgctcaggtagatggaggacagtatggccaccgccgcgagcagcacggcggagacggcgtggaccagatcgccgaaatcgtggatgcggcgcggtgcgacgtcctcgatgaccgggtgggccgtggtgccggatacgtcgtcgctcatcggacgcgcgtccggcgacgccttggaatcgtcatcgccggacgttgcggttatcgtctgatcgttcatcaccgttcctgtgctgattgatcgtcgatggaaatgggaattatcggacggctcagcggtcgaagtcgaccagcgcgccggcgacgcccgtgtaggtggcgggggtcagcgccttgagccgcgcggccgtggcggggtcgaaggactgctggtcgatgaagcgctcgaccgcctccttgctgatctcatggccgcgcatgagttccttgaccttctcgtacggcttgtccatgccgggcaggcccttgagctcgcaggcgcgcatcgcggtctggatcggctcgccgagcacctcccagttggagtcgagttcgcgttcgatgacgatgtcgttcggatggatggacttgagtcctcccatcaggttgtacagggcgagctgcgagtagccgagcgccgaaccgatgttgcgctgggtggtcgaatcggtcaggtcgcgctgccaacgggactccaccagcgtggcggagagcgtgtcgagcagcgagcaggacagttcgaagttggcctcggcgttctcgaagcggatcgggttgaccttgtgcggcatcgtggaggagccggtggcgcccttgacgggcacctgggcgaacacgccgcgcgagatgtacatccacacgtccacgcacaggttgtgcatgatgcggttcgcgtgggagacggtcgagtagagctcggcctgccagtcgtggctttcgatctgcgtggtcagcgggttccaggtcaggcccatgcggttggtgacgaactcgcgggagacggcgatccagtcgacgtccgggcaggcggccagatgcgcgccgaaggtgccggtcgcgccgttgatcttgcccaggtactcctggttctcgatgtgcctcagctgacggttcagacggtagacgtagacggcgagctccttgccgagcgtggtcggtgtggccggctggccgtgggtgagggagagcagggccttgtccttgtattcctcggccttggcggcgaggtggtcgatgatctccttgaacgccggcgtccatacctgctccatcgcgttcttcacgcaacgggcggtggacaggttgttgatgtcctcggaggtgcaggcgaagtgcacaagggtcttgagcgcgtcattgatgtgggtgagctcggccggcgctttgtcgagctggtcgtcgatgtagtattccacggccttcacgtcatggtgggtgacggcctcgtgcgcggcatgctgcttgatgccttcggcgccgaagtcctcggggatggcccgcaggaaggcgatctcggcgtcggtgaacggctccacgccttcgacgatcggctggttgccgttgccgtcgaagccgttggccagcaggatcatccattcgacttcgacgcgcatgcgctcgcggttcagcgccggctcgctcagatattcgacgagaggtgcggtctgcttgtggtagcgtccgtcgagcggggtcaatgcaattgcgggggtgatgtcagtaagcttcatagcatcccagattacttccagccgtaaacctgatgcgaaaccgatgcgtgttcgtttcgcccccgttcctgatgccttcttcgtcccggcatgtcgttctcctctcgttttcgtctgctgactgctgtttcccccgtgtttccggtgcgtgcgcgcccgtcagtcatgcgacatgcgcccctcgtagtatcgggtgtcgatgagttcgccgtcgatgatctgctggaaatgccgttcgtgcgcgtccacggctggcgagccgagatcggtggcgttgcggtacgcggcctgatgatatttgagccaatgggatatctccttggtcttcggcgcgtcggccaccagtgctccggcgtagttcgactcggccgaaccggtgttctggccgggcgtgcacgacccgtcggcgttcaccgtcggcggcgtgacgccggtggtctgcgtgactttgccccttacggtgagccattgttcggtcgaagggttgcggccgccatcgagcgaggcgacgagctcgtcctcgatctctatgctggtcacccaggtcttgggcggtatcggatggttggcgacaggagagccggcggtcaccacgtgatcgatggcgtaggagtccttcaggtcggaggccagggccgcggccacgatgccgccctgggaatgccccaccaatgccaccggctcgtccttgccgatgccggcttgtttcatggcttcctcgaccatgcggaagctgtccgcgttcctgcgtcggttggcgttggagctcatgagttcgaggttctgctcccatccgaacggcgaatcgtcctgcccgtccgtgcccggtatcaggattagccagcctgtcgtcccatcggagcggcggtatcgctggaccgctatcgtcgcataactgagtccgctgttaagggtgatcttgcccaggcgttcctcggcgagccgtcggaggttctccatggacgaggccacggaatgcgaggccccggccacctgagacgtggattgcacctcacgcacggtgagtttgttgccctgcatggcgttcttgaacttcgacgtgtactttgcgatgcgttccgcggcgccggcgacctgggtaccgccgaggatgtgcgcgatgcggttgttcgtgatgcgtcccgccagcgatgccagcagctcctcatccattttcgacgtggcatcgagcgcccgcacggggttgagcttgccgtccttgatggagcccgagacgaatccgtagagcgacagcatccccagcgtgttccatccgacgctgggcagcacggtcgtcatgatctgagcggccttgcgaagtttcgtctccgccttggtctccgcttcgtcatacaggctgtgggcgcgggcgatcagatcggcgacctgttccaggtccccggcgagcgtggcgcactcccgcgcgtgggtgacgcattgctccagcagacgcgcatatggcatggagacgtgaccgggttctccatcgccgccgctgccggccagcgcagggcagaacgccgcgctcgcacggtcctttcggagctggtcgtgggccaccgaccagaagaaccccgcgcccttcatctccttcgcctgattgcgcagcgatgccacggcggccgtatatcgttcacgggttgccggggcgtattgcgtgcctccgtgtatcgacgaagtgaccatccagttcatgatgagcctccgctccaggcgagttgcccggtctgccgcacgcggtcgtcgatggatgccgccaacctcgtatcgcggtccaatgttcgtgcgcacagtgtcgccgcattgccggtccaatccaggttcttggcggcggccatcgcggttctggactgttccagcgcgttggaggtcagccgttgcagggagccgatgcgctcccggctggacccgacagcggtgcggcaagggcagtcggcgccggcgatcgacgccatcgcgttcccccatatcgggaacgcgccgttgaagatagtgcaggtgttcatggttccatgaacgcatgcacggccatccgcgcgcaagcggagcggaacatgtggtcgaaggctcccgacttatccacacactcggcgtgtcatccacagcaaatgtggacgacgagaccggcgccgtcgcggagcactgaatggagtgatgcgcaatggtgccctcgctggcgggctgagccgtgaagcgagtagaggggctgtctgcaggcgaagccgcctggggcggtcccgggtgcctctcatccgcagcgccacttgtgccgtggcccgtctttccatcaggggagaatcgacctgacttcgccgccgattgccgtgctaaggatgctgtgccgggatggccacaccagggggaaaaacatgggaaaaatgcattgtgtggcttttgttgtgccacacaatggaatgtgagccttctcattacgtggtatggcagaaagcgaatcacagaaaccgccattttccaatgattcgggaaaacgctctgataccggcgttgccacaccagcccaaaaaccgtcgaaaatcgtgtggtgtggtacacgggcagccggaaccggacagctggaaccaggcggcgcccgggccaatcaccatggcttggtggtggagtttgtgttggaggagcttttgcccttaccgcctttggagccgttctgcgagttggactgctgattcgacttcagtaggtcgtccacttgcttgcgctgctcctgcgtcagaccgccgctctgcttggcgttgccgtccgatccgggcgcggtctgcgcgttggaggtttcggtgttttgctgcttctggagctgcgcgttgatgcgttcggtcagcgtggcggagactgacgcgttggtgtcgatcacgttcttgacttgcggcagtagcaacgcggaccatgcggccgcgtctgcgaacctggcgtcggctttttgctggagtgcgctgagcgtcgacaggtcggcgtcatccttggaagcggccttcagattgccgttcagttgcgaggtggcatcgtcgaatgcggtgacagcgatgaggttcgcgccggccgcgatgcccgcgcacaggcaggccatcgcgacgatgccgatcaggatgcgcgaccatagcggagtgcgcgctactgcgcggtctttcgcctcgcggccgttcgcctcgcgcttcttcactgtgttgcttttcatcgcacgattcgttgatttccgggatttcatagcatcctccgtgacatggcgatccatgcgccgatctcccaggcgagcagcaggcccagcgccacggcgaacggccatatcacgggaatcgtacgctcccgccgtttgaccgtctgggtgagcctccactgtcttgatgccttggcggacacggcctgttcgatggtgtgcgaggcgtccacgtgcaggtatgagccgcccatctcatcggcgatggattccagcgtggcctcgtcgagcttggatattcctggcttgccggtcgtcgggtcggtcacccactgcccgtcggattgctgtcccgttgctgtgccgtcgctggccatcggtatcttgccacccgcatcagagcccacgccgatggtgaacgagtcgtcaaggtaccgcctcagcgcagaatagctacggcgtgcggtgtcggaggtctgctcgccgtccgtgatcacatacagcacgatgatgtcatcgggatgttgatccctgattgatttgagcgacagcatcagctggtcgagcggcgtgtcgagactcgatccggccgatgtggacgtggattcgacggccagcgtgtcggcccagccgtcaatggcgatggagtccggagtcaacggcacatccagggtgccgctcgcgccgaagcgcaatgcggcgaaactggaatcggcgtacgtcgacgtgatgcccttcacgatgcgcttggccgcgtcaagacggctgattgtacccgaggagccgtattccgcgtccttgaccgccatcgatccggtgacgtcgaccgccaccatgacatcggtggcattgatagcccggctggtggtggtcgtcacgatgctgggcgtcagcatcatcacggcggcgagcaggaacattatcaccctgcgtatgcaggcggtcagcgtctcatcgctggagcgcctgcgccgcacatgcacgacgaccaccgcgaccgcgaacgccagcatgagcgccgcgatcgcgccgcccgcgatccaacccagagccggggcgaatgtcatcggtctcatcgtctcaacctccatgccagtatcatccatatcgcaagcagcacgaccagcatcagcgtccaccatcccggcgcgtcgatcagcgcggcctggcttgaccgtcggctttcgctggtacgccggctgtcaatctgcctcaccagctcgttgatgtcggatgagcccgactgggtgaggaacgttccgccgcgggactcgatctgctgcttcatctcggtggttgtggcgtcgccctcgctctggcgtggcccggagaacaggccgtccacgctgatatgcgaagcttcggccatatcgagcgcctgggcgagtgaatacgtcggcgtgccggacgccacgttgtctgtggcgagcacgatcgaggcggggcgctgccgtgcggcgccggacgtgtcgccataggcgaagccgggtatcatcgcggcgcagctgaccagcccgtccccgatcagtgatgtcgagttcttgcggttctgcgtgccttccagccaatcggcgatcttttggtagtccttgtcgctcatcttgtcgatgtcgtcctgcgattcgacgccacggagcgcgtccgccgccttggtcagctggctggagaccaggtcgtagtcgtcggtcagggggaacaccgtgcgcgatgtcgagttgaagatgctcagggcgatgcgttctccccggaaatggctcaccagttccagatatgtttcgatgaccgcccggtcataggggagcgccgaacctgacacgtcgaggcacaacacgatgtcgcgactgctggagcgttccgcgtcgcggtccacatgcgccggtctggcgataagaaccgtgcagatggccagcgccgccaccagcgccgccacggcgatccgccccagcaatcgccacagatggaacagatgcgatgcatgctcggtattgaggtcgtcgtcaagactgtataccggcatgccgtcccgcgggggacgcctgcggcctcggaagatcgcgatgacggccaccagcactgccgcgacgagcacggccgccacggcggcatacggccacagccaatggatgctcatgtcgttcgtggtcatcagcgccacctttccacgaggttcagcacccagtcggcggcctgttccacggtggcgtccttcgcctgcgcattgaactcggcgttcgcgaactccggcggatacagcgcggctatggtctggcgcagcagcgtgaaaccgtggactcccgaatcacctgccagggagcctgcggaacgtgacgcgatctcctgcagcgtcgtcgaaccgagctccgcgctgctggcctgcgacgcgaagtccctcgccacggcggcgagctcgacgaaggcgtcctcgcgcgaaagcttcccggccccgttgcgctccacgatgtcatgcacgcggcttttccactgcgagacgggggcgagggcgttgtgagaccctcggggagcggctacgcgtttcgcacgtcgaggacgggacatgatgacgatcgccacaatcaggatcagcaacgcgatgaagcacgccatcgtcactatgggcagcagagacgcgacgggcacatccgtcacgggatgcaggtcgttcacgtccacggctgcggccagcgtcgacgaggtcacgaaaccgttcatgacgttcatgcaggcacctccgacgtcaggttcagcgatggcggcacgcgcagctgattgcggatggaacggccgagcgaacgcgacaccagccgcacgaaggcatcgaacatcatgtcgctcgacgcggcgcggatcattcgcgaaccatgtttggcgagttcgtgctccagagcggcgcacacgtatctgcgatgcagcgccacctcttccgcggccttcgcgttgcgcagcagggcggggatgcggcgcccggattttccgtcataccattcgcgggcggcctcggatgggtcgaaggggttggccgtcgccacggtgatcagcaccacggggtgggtggcggctatggcgccgatgacgttgatgtgacgcttgcgcagggccagctcgtcggtggcaagcacgatgagcgcctgacggtcgcgtatgcggcgcgcgtaatccagcagagcgtcgatgttgcggccgtatgaccaatcccgccgcaaggcgtcgtccagcgtgcgctcgaactgcgcgaacccgccgttgaacggcatgcgcgtgatgctgtgggcgtcggcgaacaccagggagacgtcatcgctgcgccgcagcgacagcgcggcgaacatgcgcagcgcgttgcctgcgaccgcgtaggccggctcgcctgacgcgcatcctccggtcatctcctcgccgacatcgcacagcagccacacctggctggtcgcctggcgcgcatgctgcacgaccatcgggcggccgagacgggcgctggctttccaatcgatgagacgcgcctcgtcccccggcccgtagacgcggatgtccatcgggtcgtcattgcctccacgccggttcgaggcgtgctcgccctccaggacgcccagcgccttgcgaacggtcggaaggctcagcgaattgcccagcgcctcgatcttcctgcggatccggtcgtcggaagatgaggagtgtgaggagtgtgaggggtgtgagccatcgatcatgggacgtgaaccgtttccacgatccgatcgatcacctggtcgctggtcacgccgtcggccagcgcctcgaaggtcaggatcacacggtgcctgagcacttcgtggaccatcatcttcacatcctcggggatgacgtaatcccggccggcgagcagcgcgttggcctgcccgctgcggatcagggcgatcgacgcgcgggggctcgcaccgaggcggaccgtcgagctcaggcccttcagcggcttgtttccggcaccgcgcgaggtcgccaccagatcgacggcgtagcgcatgatcgcctccgacacatggacgcgccgcgccgatttgcgcagaaactccacatcctgaatggtgatcgtgtcggacggcagcgatttcggatcgaacatgtcggtgccgcggcgcgtgagcatcgccagcatgctcgtctcctcgtcggccttgggataggtcatgacggccttcatcatgaatcggtccatctgggcttccggcaggttgaacgtgccctcctcctcgatggggttctcggtggcgattaccatgaacggcttgggcagctcgatgcgttcgccgccgatcgtcgtggcgccttccgccatggcctcaagcatcgccgactgcgttttggcgttggaacggttgatctcgtcgagcaatacgaaattggcgtggatcgggccgatctgggtggagaaccgctgggtggagaagtcaaacacctgggtgcccaccagatcggacggcatgaggtcgggcgtgcattgcactcggcggaacgttcccgagaccgaggtggccagcgtctgggccgcggtggtcttggccaggccgggcacggattcgatgaggatgtggccgcctgcgaccatcgtggctatcagcgcttcgcgcaagtcggactgtccgaccagcgtctgggcgaatctggcgcggatgcggtcggtgagttgccgtgcgcgtcgcaggtcgtcctgcgtcagcgcggcggaaggcgccggcacgggcgtgcgcatgggggcggccggcatggcgcccgtcgtggggatcgcgttcgcgagctgggacggcattgaaggtttcgaggtgaataaagccatgctgcccaccttaccgtgacgaagcaaccgcggagtggggatcgggccgatccgcctgcgccgatggcagtgaccagtcgaccggttccgcgcccatggagaccagcgcttggttggcgcgggagaacgggtgggagccgaagaacccgcgggatgcggacagagggctgggatgcggcgaggcgatgatggtcgcgttggtgagcagcggcgcgaggctctgcgcgttgcgcccccagaggatcgccaccagcggcttcggcttgccgtccgcgtccacccgggcgttaagggcgcggatggcggcctcggtgatggtctcccatcccttgccctgatggctgttggggcgtcccacgccgacggtcaggcacctgttcagcagcatcacgccgcgctgggtccagggtgtcaggtcaccgttggcgggcatcggcacgtgcatgtcgtcgacgagctcgcggtagatgttgaccaggctcttcggcagcggtcggacgtcgggcgccacgcagaagctcaggccgaccggatgccccggagtcgggtagggatcctgcccgacgatcagcaccttgatcgagtcgaatggaattgtgaaggctctgaggatattatggcttgcgggcaggtactgacgtcctgcctgcagttcggagcggaggaaatcgcccatgtgatggacctgcggctccacgtcctgcagcgcggcggcccatccgggctccacgagctgcgacaatggtttgactggatgttgactcatggcctctactgtagcgagcgtgtcgaagctgtgcatatccggtgcatgactgacggccgtcgcgcacttgggacaacatggccggtagacttgatgaacgatacggaagggtgattatggccaaggacaaggaaacatacgattcgtatgccaaagacgtgttcgacaatcctccggcaggtccggtgggcgtgcatcggggcgcgcggtcggccggggcgcgcatgacgcctttcctgatcgtgctgcttgtggtggccctggcgggcgtcggcacatggggtgtgctgtcgggaatgttctccgacgtgctcttcgggaacaacggcacgtcgcaggcggccgacgacaaggcgtccgacagcggcgactcgaagaccggcggcacgacgaagtccggcacgggcgagcagtccacttctagttcgactgacggttcctccgacacggcttccaatacctccacggattccgcccagagcgatacgacatcgagcagcagcgacggttcggccgatgccaccggcacgaacgggcaggggacggactccaccgcctcgtccgacgcgcagtcgacgccgccggccaccgccgaggcgaacaaggccacttccgtccgcgtgatcaacggaaccaagatctccggtcacgccgccagccgtgcgtacacgctcaagcaggccggatacaagaacgtcgtctccgccaacccctccggtacgttgcccgcgagcaccgtggtctggtaccagaacgagaccgatgcggcgaccgcgaaggacatcgccgtgaccttgggcatctccgacgtgcggcagatgtcgggcatctccgcacccgtcgtcgtcgtgctgatgcagtgaccgtacatcggccgagaatccgcgtccccgtaggctttgtgcgaatgtcccctagtaccgtacaatgatatggagtcgcgaggtgggggatgcggtgcggttttgagctctcttccgtttgttcgcggcataggaacaagggaaagaatataacaatggcacagggaactgtgaagttcttcagcgctggcaagggttacggattcattacctctgatgctggtggggatgatgtgttcgtgcactactcggttattcaagccgatggtttcaagacgctgaacgagggcgataaggtcgagtacgaggccgaacgtgggccgaagggaatgcaggccacgaaagtggtcaagctctgaatcgtgcgaggctttgcgcgtcatcgaagctccggtacccaatgggtgccggagctttttccttttctttcggctttaccggatcggtatcggcatgctccggccttcgcggatcacgcgatgatttcaagccaacagcgcaatcctcatgaatatgttggcactcgggcaccgagagtgctaatctcccaattagcactcggggagtgagagtgacagccggcagctgacggtcggcggccacgcctcgcccccaggtgagattcagtaccgtgaagccatttggaggatacacaaccatggcaaagatcattgcatacgacgaggaagctcgtcagggcatgcttgcgggtctcgacaagctcgccaacaccgtgaaggtcactctgggcccgaagggccgcaatgtggtgctcgacaagtcctatggcgcaccgaccatcaccaacgatggcgtctccatcgccaaggaaatcgatcttgaggatccgtacgagcgcatcggcgccgagctggtcaaggaagtcgccaagaagaccgacgacgtcgcgggcgacggaaccaccaccgccaccgtgctggcccagtccctcgtgcacgaaggcctgaagaacgttgtcgccggctccaacccgatcgcgctgcgtcgcggcatcgagaaggccaccgacaccatcgtcaaggaactggtcgccgccgccaaggacgtggagaccaaggaccagatcgccgccaccgccacgatctccgcagccgaccccgaggttggcgagaagatcgccgaggctctggacaaggtcggtcaggacggcgtcgtgaccgtcgaggacaacaaccgcttcggccttgaccttgagttcaccgagggcatgcgtttcgacaagggctacatcgccccgtacttcgtgaccaacgcggacgaccagaccgcggttcttgaggatccgtacatcctcctgacctccggcaaggtttccagccagcaggacgtcgtccacatcgccgagctcgtcatgaagtccggcaagccgctgctgatcatcgccgaggacgtcgacggcgaggcgctgccgaccctcatcctgaacaagatccgcggcaccttcaactcctgcgccgtcaaggcccccggcttcggcgaccgtcgcaaggcgatgctgcaggatatggccatcctgaccggtgctcaggtcgtgtccgacgagctgggtctcaagctcgactccatcgacatgtccgtgctcggcaccgccaagaaggtcatcgtctccaaggacgagaccaccatcgtttccggcggcggcgacaaggccgacgtcgaggctcgcgtggcccagattcgcgccgagatcgagaagaccgactccgattacgaccgtgagaagctgcaggagcgtctcgccaagctggccggcggcgtcgccgtcatcaaagtcggcgcggccaccgaggtcgaggccaaggagcgtaagcaccgcatcgaagacgccgtgcgcaacgccaaggccgctatcgaagagggcctgctgcccggcggtggcgtggcgctcgtccaggctgccaagaaggccgagtccgcagaagccgtcacttcgctgaccggcgaagaggccactggtgccgccatcgtgttccgcgccatcgaggccccgatcaagcagatcgccgagaactccggcgtgtccggtgacgtggtgttcaacaaggttcgcgagctgccggagggtcagggtttcaacgccgccaccgacacctacgaggatctgctggccgccggcgtcgccgacccggtcaaggtcacccgctccgctctgcagaacgccgcgtccatcgccggcctgttcctgaccaccgaagcggttgtcgccaacaagccggaaccgaaggccgccgctccggccgccggcgccgacatgggctactgatccgctctcggaatccgccatcgcagcgcggtagcgcgttgcagcagcggatgccgtaacacggatttgccgcgatgtgaagggcttcgacctgttgagggtcggagcccttttcgtatgtctgcgggcgtaccggagcggatcaccgccgtgatactgttcagccggaagcgaacagtcgggacgcctgcgcttcggcgtcggcgtagacggtggatgcctgggtgagcgcctgctggatggattccagcgacgcctccatctgctgctgtgccgcacgccactgcgcgctcaccgaagtgaactgtgtggcggcaccgccacgccaggcgtcctggagaccgttgaggttcgtatacattccgttgaccgcctgccggatggcggcgatggacgccgaaacggcggcggaggaggattggatccgttcggaatccacttgatattggggcatggttgttcctttcctgtattgttctgttttcgcccggtgacgttgaagcgtccggccggtaatgtggaggatatgacattgcgaacgatgagatacggaaaaacggatgatgtggtcgaaggctcggccattttgggggttatcggcgtgtcgcgcgacggattttctctgtggaaacggctgttttccgcggttttgacggtgctggtcataacaatgtggataacttcgcccggtgcggtcgcatacgccgccggggacgattcgtcgtcctcggaccaggggcaggccacgttctcccaggacataaccgatccctacaacgtgctcggctccaatctgacgaaagttacggacgccatatccagcacctacgacagcaccggcgtgtcggtcaagctgtcatacatgctgcatttcgagggggtagaggaccccgaccaatgggcgcaggaggcgttggacgccaccaaccccaaaccgaacaccgtgctgctggccgtggccctcaacgacggcaagctcgtggtcgccgtctccggcaactcggaatcgtggctgtacaacaagaccacgtcggaccagctgctgaaaagcgcctacgggccggtcagcggcaggaaccccgactggtccggctcggcgatcgccatgatggattccatcgccacgatcaagacgaccacagcgcagcgcggcacggtgtggaaatgggtgggcatatccgtgatgtgcggcgtgctggtggttctgatcgtcatcggcgtcgtgacggtggttcgccgtcgtcgcgatacgaagggcaagcagccggatgccgagaaggacgcaggaaaatccacagagaaagccacgaagaaagacacgggcaagtccgccaagaagcggcgctccaagggtgatgcagccgagtcggactccccggcggaggacgacggcaggccgcagtccgcttcaagtgaatccgacgagcagtccgctccgtccatacccatgacgcgccgcgaacggagggaggcatcccggcgcggaaagcggttcggaacgtcgtcggccgccaccgcgcccaagccgggcaacaccgacgaagccgccgacgaaggctcccgggagcgtttcgacgcgtggctggcgtccattgtcccgcaagacacagatggtgttcaggaaacatccagaacatcgagtcaagctggtaaccatgagcaagccgattgaagcatccattgttgttgtcgacgacgaaccgtccatccgtgaactgctcgtcgcatccctgcatttcgccggattcgatgtggccaccgccgcatcgggctccgaagccatcgaggtgatcgagaagacccagcccgacctgatcgtcctcgacgtcatgctccctgacatcgacggattcaccgtgacccgccgcatccggcaggagggcattggcgcccccgtgctgttcctcaccgcccgcgacgacacgcaggacaaggtgatgggattgaccgtcggaggcgacgactacgtgaccaagcccttcagcttggaggaggtcgtggcccgcatccgcgcgattctgcgtcgcacccgtgagcaggtggaggacgatccgatcatccgcgtcggcgaccttgagatcaacgaggattcgcacgatgtgtcccgcgccggtcatgcgatcgatctgagcccgaccgaatacaagctgctgcgctacctgatggacaacgagggccgtgtgctgtcgaaggcgcagatcctcgatcacgtctggcaatacgattggggcggtgacgcggcgatcgtcgagtcgtacatctcgtacctgcgcaagaaggtcgacggcatcatggtgaccgacgacaacggtgaacagcacaaggtcaccccgctgatcgagaccaagcgaggcatcggctacatgattcgcgagcccagagtctcggcgtgaggcgggcgcgatgaccgcacagacacctccgccgacgggtgacggaaccgccgcaggcccggctccggcaccgggaaccgcgccgaccggcacggccgggattccgggaaccgcgcagatgcctccgccgacagccgcccctgcgagccagaagcgtgcgacccataccaagggtgtgtgggcgacactgaaatcgatgttcgtcgggcgtctggacgccgttccgctggccaccaagatcgtggcgtgcacggtcatcctgctgatcgtgggtacggccggcatatcactgacgttgcgccagctggtcggcaactacatgctggagaagacggacacgcagctgttccgtcaggcgcaactggtcctcaacaacatcgataccatgcgccagcagaataacgccgagaaatccagcagcagcctgctgtacagctacttcgtgcagatccgcgacagcgacgacaccatcttgcgcaacgccatcgtccccactctcaaggacggcgtcagttcgatgccgttgctgcctatgaacggcagccgcggaggcgtgcagctccagcagccgttcaccaccaacgccgtcgtgacgttgagcgggcggagcgtggaccattccacgctgtccaccgccgaatcgccgtggcgcgtcgtggcgctgccgtggaccgatgaggacggcaagcccggcggcgtatgctacatcggtctgtcgctgagcgaccagcttgacaccgtaaagacattgacccgttactgcatcatcgtcggcgtggccatcgtcatactcggcgccctgctggccacgctgatgacccagagaacactgtctccgctgaagcgcatcgagaagaccgccgcgaagatcgccgccggcgacctcacacaacgcgtgcccccggcgccggagaacacggaggtcggttcgctgtcggtctcgctcaacgccatgctcacccgaatagagcagagcttccacgagcaggaggagaccacggcgaagatgaaacgattcgtctccgatgccagccatgagcttcgcacgccgctcgcggcgatccacgggtatgcggagctatacaagatgcagcgtgacctgccgggtgcgctgggacgcgccgatgagtcgatctcgcatatcgaggattcgagcacccgcatgacggtactggtggaggacctgctgtcgttggcgcgcctcgacgaggggcgtggcatcgacatcacccagcaggtgccgctgaccacgctggtcacggacgcgaccgaagacctgcacgcgctcgatccgggccgtgagattcgccgcggcacgctgacattccagccgcgcaacggggatgagccggccgatctggagttcgtcgaaggcccgctgcccgatgtcacgctgaaaggcgacgggtcgaggctgcggcaggtggtcaccaacatcgtcggcaacatccaccgctacacgcccgccgactccccggtggagatatccgtcggcgtcatgcccgcgtcgatcagccccgaatcgttggcccgcatgtccgcgaatgacgcttcgatgcgctacttcatcgaagccgtggacgtaagccgctccatgcagatgggcatgaactacgcggtggtccgcttcagcgaccatggtccgggcgtgcccgagaactcccgctccaagatcttcgagcggttctacaccgcggacccgtcccgggcgcgtctcaaaggcggcaccgggcttggcatggccatcgcgcagtcggtggtcaaggcgcacaagggcttcatctgcgcgaccgactcccagggcggcggcctcacgctcacggtggtgctgcccgtagcgccgctggagccgaagatcgccgtgggcgaaccccctcaggacgccaaggcggaacgcaaggccgaacgcaacaaagccaagcaggagaaacagcaggcgcggcagcacaagagcgagtgattcgcgtccggtgcgctgccgcgtgccgtgcgttcatgcattgaggtaaactgatactttgatgtattcatgagcagatcgagaatctgccggtccgacgagtaacgaggtgtgccatgcccagtgggcgcgtacgttggttcgacgcgaaaaagggattcggattcattacgaacgacgagggcgaggacgtgttcctgcccgcagcggctctgccggatggcgtgaccaccctgcgcaaaggcgcccgcgtggagttctccgtgatcgacggccgcaaggggccacaggccatgggcgtgacgctggtcgcatccgtgccgtccctggtcaaggcgacccgcccgaagccggatgatatggccgccatcgtggaggaccttatcaagttgctggattccgcgggcaacgagctgcgtcgccatcggtatccctccgccgccgacagccggaagctcgccacactgctgcgtggcgtggctgacagcttcgacgtgcaggaatgaggggacaggggatagtacatgcctgaaacgaccatgcctgagacggttgtggacgaacccggtatcgcggattcgcccatcgcctccatcgacccgaaagacgctgcccgtgccatggccgtcgaggctgccgaggacgagaacggcgtcggagagttcgtcgaggccatcgacgccggtgacggcatcaccgattaccggttcgtctcgctgatgcgcggctacgagggatggcagtggtccgtgacgatgttccacgatgtcgaacgcgacacgtggacggtgaacgagtcaacgcttattcccatggaacaggcgctgcgccctccggaatggattccatggaaggaccgtctgctgccgaccgacctgtcggtgaccgactccatcggcaccgacccggatgatccgcggttggaggaaggtttccgggcgaccgccgaagccgagaccggtgacacgcgcgtttcggatgcacgggacgtggaggtggccggggccccgggcaaggtcgatgccgcggatgaggcatcggataccggagcgtcggattctgaggcgcctgacagcgaacctgtggagtcccaggacgctcagcccaccacagctgcggaggatgtcgatgacgcggtgagcgcattcgatctgtcccgccgccatgtgctgtccccgctgggccgcgcccagaccgcgcagcgctggtatgagggccctcgcggccccaagtcgttgtccaccaagaccgcgtcgggcaatctgtgctccacctgcgggttcttcgtcgcgttgcagggcgatctgagcgaaatgttcggcgtctgcgcgaacaagtggagcccggacgacggcaaggtcgtctcgctcgaccacggatgcggcgaacattccgaaatcgagccgcccgagccgagccacatatggattcaatccaagcccgcgttcgacgacctgcatatcgatgtcatcgcgcaggcgccgcgggacgagcgcggcgaagtggagctgatcgagaagctcggtgccgccggcctgccgttcgacgtgcccaagggcacgatcatcctcaaatcccagctgcctgaaacgcgctgacccgaatcgcccgcaacacgggcaacgtcacggcgaccgaatggcggaatgacgatggaacgataatcgcctgtgacaccacgcgaagcggtgtcacaggcgattcgtctatatccggggttgcgcatccgggccagcgcgcgatggcgctcagtgcacgatggtgaccgtgcactccgcgaagttcaggatctgcctcgacacggaaccgaggaaacgggcgtccaagccgctcagaccgcgggatccgacgaccagatggctggcgaaccgggatgccgtggtcaggcccttggccgccgcgatgtggaacgccttgcccgtcacctgaagcccgtcgggaatatcggcctgctcgatcatgcgacggacgatgtcctgcgcgtgatcctgaccggcgccgatcgaggcgatcgcgttctcgtagccgggcacctcgcccagatccttcagctgccagcagaacatgacctgcagtggggcgtgatgcagcgcggcgaaatcaatggcgaaccgcaacgcatgacgggacgtctcggaaccgtccacgccgacgaccaccggacgtttgcccttggccgcggccagctcatcgtcatcatggtggatcggcataccgggggcgagcgaatgcgcgatatcatcctgcacgctcttgtcctcgttgccggcgatcctgaccaccgtcaccggcaccttggcggattcggcgagggaggacgacagcgaccccacgaaccatctggtcacgcgacccagggatcggcggccgacgacgatctgttgggcatccgctccgatttgcagcagtccagtcgtgccggaggcgtgcacggaggtgagcttcaggttatccgggtcgaatgcgatgccggcgctcgcctcattcacccaatccagcagttgctcggtgatggccttgctcgccttctcccacgcgtcgggattgtccggctgggctcccatatcccacgaatgcgtccacgcatagaccgcgttgaccgccctgccgctcaaggacgcctccctgagcgcccattgcaaggccgtgaacgactcctcggagccgtccaccccaacgacgatgtcgccggctccgtccgacgtccgcggctcggactcgatgttcacatctggttgcgtcatgacatcctccttgttggcatgttatattcagcatatcgtttttcattgcgttatgagcgcaattatcgcgaggaaaggcataaacgtcatcgcgaatcggtagagtggtgtggactatcgagatggaaggacaagcatgttcgaacggtttaccgaccgtgcacggcgcgtgatcgtgttggcgcaggaagaggcgcgcactctccagcacaactacatcggcaccgaacacctgctgctcggcctgatccgcgaaggtgagggggtcgccgccaaggcgctcgcatccaagggagtgaccttggacgacacccgcaagcaggtcgaggagatgatcggcaaaggcaatgccgcccccaacgggcacattccctttactccgcacgccaagcaggtgttggagctgagtctgcgcgaggcgctgcagctcggtcacagctatatcggcaccgagcacatcctgctcggcctgatccgcgaaggcgagggcgtgggcacccaggtgctcatcaagatggatgtcgacctgggcgaactgcgttcggccactatcgacatgatccatggcaacagcggcggcgccaatgcctccggcaagggcgatctggccaacgccggtggcgtgcaggacaagcgcagccagaccggttcggccattctggaccagttcgggcgcaacctgaccgccgaagcggccgagggcaagctcgacccggtgatcgggcgcaccaacgagatcgaacgtgtcatggtcgtgctgtcgcgccgcacgaagaacaaccccgtgctgatcggcgagccgggcgtcggcaagaccgccgtcgtcgaaggcctcgcgcagaagatcaacgccggcgacgtgccggagacgctgaaggacaagcaggtctattcgctggatctgggctccatggtggccggctcgcgctaccgcggcgatttcgaggaacgcctcaagaaggtgctcaaggagatcaagacgcgcggcgacatcgtgctgttcatcgacgagattcacacgatcgtcggtgccggttcggcggacggcgccttgggcgcgtctgacatgctcaagcccatgctggctcgcggtgagctccagaccatcggcgccaccaccaccgacgagtaccgcaagtacatcgagaaggacgcggcgctggaacgtcgtttccagccgattcaggtgcatgagccgacaatcgcggagaccatcgaaatcctcaagggcctgcgctcgcgctacgagaaccaccaccacgtgaccatcaccgacggcgcgctgcagtccgccgcggagctgtcgtcccgctacatccaggaccgcaacctgcccgacaaggccatcgacctgatcgacgaggccggcgcgcggctgcgcatcaagcgcctgaccgccccgcccgagctcaaggaacttgaccagaaggtcgcgaaggtcgccgccgagaaggacaaggccatcaaggaccaggacttcgagaaggccgccgagctgcgcgacaaccaggagaagctggaagcggagcgcaaggagaaggaatcctcctggcgcgagggcgagtccgatgtcgagatggtcgtgaacgaggatgtgatcgcccaggtgatctcctcgaccaccggcattccggtgttcaagctcacccaggccgagtcgaagaagctgctcggcatggagtccgagctgcacaagcgcatcatcggccaggacgaagcggtttccgcgctgtcccgttcgattcgccgcactcgtgtgggcctcaaggatccgaagcgtcctgcgggctcgttcatcttcgccggcccgaccggcgtcggcaagaccgagctggccaaggcgctggccgagttcctgttcgacgatgaggacgcgctgattcgcgtggacatgtcggagttctccgagaagtatgcggcatcgcgtctgttcggtgctcctccgggatacgtcggttatgaggagggtggcgagctcaccgagaaggtgcgccgcaagccgttctccgtcgtgctgttcgacgagatcgagaaggcccatccggacatcttcaacacgctgctgcaggtgctggacgacggtcacctgaccgatggtcagggacgcaaggtggacttcaagaacaccatcatcatcctgaccaccaacctgggtacgcgcgacatcgccaaggccgccaacaccggcttcaaccttggctcgaacgcggagtccagctaccagcgcatgaaggatcaggtcagctccgaactcaagcagcagttccgtcccgagttcctgaaccgtcttgacgacatcatcgtgttccgtcagctcaccgagccgcaggtgcgtcagattgtcgacctcgacatcaagcagctcaacgaccgtctgttcgaccgtcacatgtcgctggagctcaccccggccgccaaggacctgctcgcgcagaagggcttcgacccgctgctcggtgctcgtccgctgcgccgcgtgatccagcgcgacatcgaggacgccatctcggagaagatcctgatgggcgaactcgaggacggtcagcgcgtggtggtcgactccgaaggcgagggcatcctcggcgagttcaccttccgcggcgaacagttcgacgacgccaagcccgagaacgagccggctgcggagccggcaacggaggagtcagctgacaagtcggctgacaacgccgctcccgcctcgcaggaggcctgatcgggtaccggttgaccgccgactgaccacccccagtctcgctacactcgacagccccgtcagcgggggcgtgaattggctcccgctggcggggctgtcgcgaagcgactgggggtggtctgcaatatcctcccactcatgccgtcctcaggacggcaaatcacccgcgctcatactcccaccatgcgattccgtcctgcagtggaaaccgacacaacgaagtgttggtcagaaagtatctggccgcgatcattactttggcctgtgctatgacatgtgcgataccaattgcacacgcagacggaacctctcccgaaaacgagttggtcaccgtcgtgttggtacaggacgctgagaggatggtcagcgccgacattcccgcacagtatgtgcaggagtataagaacaggctcaagaacgaaaaattcaaggccgccgagattgccgaggcgaccggttccgagataagtctcatgaccacgacagctaacaacccgctgaagccaaccgtgacatatttccggaaaagcagctgcttcatgcaattcatatggccggtggtttgtcatacctgaatgtaacgaacggcctattcatgattgctgtcatcgtattcgccggtctgcttggcctgttgctcagtatgatgatgcgtcggcagcagacccgtgagcaggcgcatgagcgcatgctggagcgggagcgtcaggaacatcacgctcagacgctcgattacgccacgcaggtgcacgactcgggcggacgcggtatccgttgatcggttgcgtcgactatgtgacgctcttcgagaagagcttgccggcaagggattccatggagggttcgcgctgcacgacaatggactcatggaagacatcggccccgatcatatgacgctgcttggcgagctgctcaatgaaatcgcccataacatcatccggcattgcccggcaggttgcgaattcgattgcagcgtgatgcttcacgatgacgtcgcagaagtcacccagtacaattccgtgactcatccggccgataaaagtgagacggcggtctccacacatatgggacttggcctgtgtcgtgacagactgctccatatcggcggcatgctgcgcaccgaggtcgaggacggcacttggatgctgtatgcccgtgtgcctctatcgcatcaaacctgaccactgtcgtagcgtccgcggtgtcgtaatacaaaaaagagcgccggggagaattccctgacgcccatgccaacgagacgatgacagccggtaatcggtgtgtcggccgaccgtcctgacgacggcggccggccgacacaccgggccggacagcggatcggcctacttgatagcgttgagccactgctccttggtggccttctccgcctccagcttggccttcttctttgggtcggactcggtcgcgatcttctcgtcaagctcggcgagctgagcggtcagctgctcctcgaagctggacttgcgggcgtcggcctctggatcggtcttcttccacgcggcgtcctcgacggccttgatctgcttgtcgacggcgtcgagacggccttcgatgcggcgcatgtcgtcgcgcggcacatagccgatctgatcccactcgtcttggatggctcccagcgcctgacgcgccttcttcgcggcggcctcgtcggcgacgggtaccagggcctcggccttcttcagcagctcctccttcttggcgaggttctctttctcggaggtgctgatctggtcacggtcggcctgacgcgcgttgaagaactcgtcggctgccttgcggaactgcgcccacagcgcgtcgtcatcgctgcggccgacgcggccggcccgcttccaacggtccatcaactcgttgaaccggcgcgaggtctcgccccatgcggtcgagtccttcagctggttcgcctcggcgatgatcgcctctttctcggccttggcatgggcgcgctcgacgtcgcgggcctgcgaccacttgcggcgggcctggttgaacgtggtgcgtgcggcggagaaacgcttccacagcgcgtcggcctgcggcttgtcgatgtgcacggacgtgcgctgatgctgctgccactggtcgaacaaggaacggaacttgtcggcggtggaacgccagttgatctcgtcatccagcgaggatgcgagggcctcggccttctcgacgatcttggtgcgttcttcgacagccttggcgatcgccgccttgcgggccttggtgagctcggccttcttcgcggcgccggcctccttcagctgctcgaactgctgcttcagcgcggccatgtcgccgaccgccgcgggcttgtcggtctcctgctcaagggacttcagcgtctcgtcgatctcgtgcgacttcaccgtgtcggaatgcaggcggctcgccagcagatccaacttggccttgaggtcaaggtaacgacgggcgtacagcgacagcgcctcctccttggagacgtcggggaactgcccgacctcacgctcggagtcgccctccctgacgtacacggtaccgttgtcgtcgacgcggccgaacgcttcggccgccttcacctcggcgtccgaatagctggatgccgaagcggcgggggcggggcgcttgaccgctttcttggcgaatgcggccggcgaaggggcgtggggtttcggcgcggatgcaggggtcggtgccggtgtgggcgtcgttgcctgctcggtgggttcggtggtgttgtcggatatggtggcagtctcgtcggccatggccagctccttataagcttgaaggtagtcgttggctggggaaaaatccgaatggatttttccgcaacctcccctattatagggaatcgtggctaaaggcgcatcaatatcaggatttccagagtggctcccctctgaacgtgttgtggagcagcgtgtcatcgacacgctccgtagggttttcgagctcaacggtttcatcggcatcgagacacgcgcggtggaacagggctccagtctgctcaaaaaaggcgagaccagcaaggagatttacctgctgtcccgtctgcaggaggtcgggcacgaatccgacacgccggtcaatgaccggttgggtctgcacttcgatctgaccgtgccgctgagccggtatgtggtcgagcattccggcgacctcgcgttcccgttcaagcgttggcagattcagaaggtgtggcgtggcgaacgtccgcaggaaggacgtttccgcgagttcgtccaggccgatatcgacgtaatcggcaacggcgacctgcccgaccattacgaggtcgagctgccgctggtcatggtgtcggctcttgaggagctgcgcgcattcggcctacccaaggcgaccgtgcacgcgaacaaccgcaagctgtccgaaggcttctaccgcggacttggcctgaccgacatcgagggagtgcttcgcgagatcgacaagctcgacaagatcggcgcggacgaagtggcgaagctgctcgtcgacacgtgcggcgccgatgaagcgcaggcccgcgcctgcctggaactggccgaactcaccgccgccgacggcaaggagctcgccgacaagttcgacgcgctgtgcgccgcgcacggcatcgcggccgattccgccgcgtacatgctggcccggcagggactggacacgctcgcgatgatcgtcgacgaagccgccctcatccgcccgggcgcggtgatcgccgacctgaagatcgcccgtggactcgactactacaccggttccgtatacgagaccttcctcgacggggcggcgtcgcttggctcgatctgctccggcggccgttacgacaacctcgcctcgcagggcaaccgcaagtacccgggcgtcggcctgtccatcggcctgagccgtctcgtgtcgtacatgctgcactccgccggagcgcacgccagccgcgtctgcccggcatccgtgctcgtcgccgtgtggaatgagcaggatcgctccgccgcgaatctcatcgcgaacacgctgcgctcccgcggcatcgccgcggacgtcgcgcccactgcggccaaacttggcaagcagatcaaatatgccgacaagcttggcatcccgtatgtgtggttcccggccggcgcgacggacggcgacgacacggcatccgacgaggtcaagaacatcgtcaccggcgatcagcagccggccgatcccaagtcgtggcaaccggatactgtgtatgcccggcaaaccgttgtaatcgactgattttcgtcagcgcccgtcctctgccggggacgggcgcgcgttgcagggaaaccattgcatagattgcataagaaagaggaagcatgagccagacggcttacagaacacatcatgccaccgaggtgaccgaagcactcgtcggtcagaaggtgacgctcgcaggttgggtcgatcgtcgccgcgatcacggcggcgtggcgttcatcgatttgcgcgacaactccggcttggtgcagatcgtcatctacgacgaggagatggcgcgcccgctgcgctccgagttcgtcatccaggtcaccggcgaggttcgtctgcgcccggacggcaacgagaacacgcatctggccactggcaagatcgaagtcgtcgtcgagaccatcgatgtgctcgccaagtccgatgcgctgccgttccaggtgtccaccgcgctcgaaaacgagtccgagaacaagctgcccggcgaagatgtgcgactgaagtaccgttacctcgaccttcgccgtccgtccatgcagcacaacctcaagttgcgctccgacatggccaaggccgcccgccacgcgctggaggagatggacttcaccgaggtcgagaccccgaccttcatcaagtccaccccggaaggtgcccgcgacttcgtcgtgcccgcccgtctggtgcctggctcctggtacgcgctgccgcagtccccgcagctcttgaagcagctgctcatggtctccggcgtcgagcgctactaccagctcgcccgctgctaccgtgacgaagacttccgcgccgaccgccagcccgagttcacccagctcgacatggagatggcgttcgtcgaccaggaggacgtgatggccatggccgagaaggtcatcgccgccatctggaagtccgccggctacgacgtgcagctgccgattcagcgcatcacctggcaggatgccatggacaagtacggctccgacaagccggacctgcgtttcggcaacccgctcgtcgagctcaccgaatacttcaaggacacgccgttccgcgtgttccaggccgactacgtcggcgccgtcgtcttcaagggcggtgccgccaccccgcgtcgtcagttcgacgcatggcaggagtgggccaagcagcgcggcgccaagggcctcgcctacgtgtccttcaccgaggacggcgagctcaagggacccgtcgccaagaacctgtccgattccgagcgcgagggcctgatggccgccgtcggtgccgagtccggcgacgccgtgttcttcgccgccggctcccgcgaatcctcccagctgctgctgggtgccgtgcgcgtggagctcgcccgtcgcgagggcctgctcgatccgaagaagttcgccttcacctgggtcgtggacttcccgctgttcaagcccaccgacgacccggatgacgatgatgtggccgtcggccactccaagtggacctccatgcaccacccgttcaccatgccgagcaaggactggatcgacaagttcgatcaggatcccgagcacgccatgtctgactcctacgacatcgtctgcaacggcgaggagatgggcggcggttccgtgcgtatccaccgcgacgacattcaggaccgcgtcctcaacgtcctcggcatcgctcccgaagaggccaaggagaagttcggcttcctcctcgatgccttcaagttcggcgccccgcctcacgcgggcatcgccctgggctgggaccgcaccgtgtccatcctcgccggtgccgacaccattcgcgacgtcatcgccttcccgaaggccggtggcggtcgtgacccgctgaccggcgccccggctccgatcagtgacgagcagcgtgccgagaccggcgtcgactacgacccggatgccgaagactgagtaacatctcgctgtcttctttgacgggagggcccagaccatgcaggtcggggccctctttgcatatccgtctgcgcagtgcacaggccgttttttcgcagttgtccgcaccctgctacccgtgaggattgccgaactgctgttttgcgttcctatgtgcgcgccgaaacgacaagtgcgcgcacatagcgacgcaaatggcccggtttgcgttcttaagtgcgcgcggtcgtcgtttcggcgcgcacataggaacgcaatgacggccaaagcacatcagatgcatgccatgtcgaccatttgatgatgggcgatgaggtcgggcagggcacaatgggatcgtgatcaccattggaatcgtggataacgaccggttcgcattgcccatgctggatatgccgctgaccgacattcccggtcccgagatctgccggcgtgttcgtgctgcatcagccgacatcgtggtacttggcatcacatcgtattcgttggatcattaccgtcagctggcgatcgatgcgggcgcccaggggttgattgccaaaagcgtgacgccgaaggaactcgccgaagccatgcggaatgtcctggtactgccgttcccgggtttcccgaccacggaacaggcacatgggtcgatagtatcggcatcggcgcgacggtcccggacactgtcgaagcgggagcgtgaggtgttgggtctgtatgccgacaactattcgacggcggagattgcggagcgcctgggaatagcggattcgacggtgtccgtggtggtgcggcacgcgaaggtcaagctcgacgtcgccgctcggtcggaggccgtgcgcgtgtttcgtgcattgtactgagtcgaatacggcttgaacatcgtgcgtctgtttacggtgaccacccccagccgccggtaccgatcgaagccgctgccatgtcgatccggcatgttgatgacgtcatgcgtgtcatgcagcgcccgcatgacgatggagcgcagcgattgtgcttccgcttcctccagcagccctgcgtcgaggtcatgatcgatacgcatgaccgcgtaggcgagatcgttggagattcggtcgtgcacacgcacaagacccgcaaggcaccgcccgaattcgccgcggctttcgtcaccgcggacacgcacgccgacctcaacggcgtggtcaagcacacgctggaggtgtccaaggtcagtttcgtgccgattgacgcggccgtcgaggcgaccggcatggagtcgggcggcatgtcgccgatcggactgcccgatgactggccgctgctcgtcgaccagcatgtgctgtcgattcccaagctgtatctcggctccggcatccgcccgtccaaactggtggtcgacggctcgatcttcgctgatattcccggtgtccgattcgtccccggtctgggcaagccccggcagtaagacgccgtgcggccgcgggcgagtcgcacaggcgagtcgcatgttggacgagaatgtgagcttcttgtgccttcaatagtttatactgctcaatatgtcagaaaaacaagaagcaatactccccgtggtgccgctggtaccgggcaatgaacccacaggacgacctctcgtcgaactgactcacgtggaaaagtacttcggcgacctccacgtattgaaagacatcaacctgaccgtcaacaagggcgaagtgctcgtcgtcgtggggccgtccggctccggaaagtcgacgatgtgccgcaccatcaaccgcctggagaccatcgagtcgggcgacatccgcatcgacggcaaggcgctgccccaggagggcagacagctcgcgcagctgcgcgccgaagtcggcatggtgttccagtcgttcaacctgttcgccaacaagacgatccttgaaaacgttaccctcgcgcccatcaaggtgcgccacatggacaagaaggaagccgagcgtctcgccatggatctgctgacccgtgtcggcgtcgactcgcaggcgtccaagatgccctcccagctgtccggcggccagcagcagcgcgtggccatcgcccgcgcgctcgccatgcgcccgaaggtcatgctgttcgacgagccgacctccgcgctcgaccccgaaatggtcaacgaggtgctggacgtgatggtcgagctcgcgcgagaaggcatgacgatgatctgcgtcacccacgagatgggcttcgcgcgcaaggcggccgaccgcatcgtgttcatggccgacgggcagatccttgaggagaacacgcccgacgagttcttcggccatccgaagaccgaacgcgccaaggacttcctgtcgaagatcctcacgcactgattggtcgtgacgcatatgacggtattcaacactcgcatcaggcgcatcgcccgccgcgcgctcgcggcgctcgccgccgtggcatgcgcgatgtcgctggccgcgtgcggcgccgacgaaagcggcaagatacgcatcggcatcaagttcgaccagcccggcctcggcttcaagaaatccggaacatacgtcggcttcgacgtggacgtggccaagtacgtcgccaagaagctcggctattccgaagacgagatcgtctggaaggaagccccctccaagcagcgtgaggccatgctgcagaacggcgacgtcgacatgatcctcgccacctactcgatcaccgacgagcgcaagaacgcggtctccttcgccggcccgtacttcgtggccgggcaggacctgctcgtgcgcaaggacgaccattccatcaacggccccgaagacctcaacggcaagcgcctgtgctcggtcaccggttccacttcggccgccacagtcaaggagaaattcgcctccgaagtgcagctcatggagcagcccggctatgcggaatgcgccacggcgctgttctccggcatcgtggacgcggtcaccaccgacgacatcatcctcgccggcctcgcctccgcctcgcgcggcaagctgcgcgtcgtcggccagccgttcacgcaggaatactacggcgtgggcatcaagaagggcgacacggcgctcgccaagaagatcaacgccgccatcgccgagatgatcaaggacggttcctgggagcgcgccatcgccgacaacaccgagggcacgtcgtacacgccgaatgcggagtacaacccgccgaaaccgaccgagggggagaagtagcatggacggattcatccaactgttcagcgagtacgacgttcccgccgcgttcctggtcaacatcgaactgacgctgtggtcggcgctgttctcgctgattctcggcgtggtgctggtcatgatgcgcatctcgccgatatcctcactgcgcaccgtcgccggagcctacgtggaactgttcaagaacctgccgctgaccatcatcatggtgttcatggtgctgggcgcctacgcgcagctcaagctcacgttctccgacacgttcgccacgaacttcttctggctgtcggtgacgggcctgagcctgtacaccgcggcgttcgtgtgcgagtcgctgcgttcaggcatcaacaccgtgccgatcggccaggccgaggcggctcgtgcgctcggattgggcttcatgcagtcggccacgcagatcatcctgccgcaggcgttccgcggctcggtcgcgcctctcggcaatacgctgatcgcgttgctgaagaactccacggtggccgcggccgcgtcggtggccacggagacgtcgtcgctgatgagcacgatgatcgaattccacccggacgtgatcgtgcagatcttcctgatcttcgcgttcggctatgtgattctcatcatcccgatcggcatgctgaccacgtacctgtccaacaagctcgccgtgcggaggtgacgacatggctgatacttccaattccgtattgttcgaccagcccggtcccaagggacgtcgcaccatccgcatcgtcaactgggtcgccgcgctgatctttgtcggcgtgctggtgctgatcctgatgcgcctgcacaacccgccggacggcgagaaccagctgagctgggagctgtggaagcccgcgctggagcgtgaggcgtggactgatttctatcttcccggcctgtggatgacggtcaaggcgtccatcgtcgccgttgtcggctccgtggtgttcggcctggtgttcggcgtcggccgactgctgccgaacgtggtgctgcgggcgatctcgtcggtcgtcgtggagttctgccgcgcggtgccggtactgctgctgatgatcttcttctggcgctggttcgcgttcgcgggactgtccagcccgtcctactgggcagtggtgctggccctggtgctgtataacggctccgtggtcgccgagctggtgcgttccggcgtcggcaacctaccgaacgggcagcgtgaggcgtcgctcgcactgggactgaccgagacgcagtcgctgatgcagatcgaggtgccgcaggccgtctacgcgatgttgccggccgccgtcacgcagctggtcgtggtgctcaaggataccgcgcttggatcgatcatcatgtacaccgatctgctgcaggagtcgcgccgtctcggctcgatgtacttcaacatcctgcagacgctggtcgtggccgcggtcgtgtacttcatcgtctgctggctgctgtcgcgtctggccgaatggctgccgtcgcgcatgcagcagcgcaccgcggcgccggccgaaccggaaccagttccgccgatcgcgatcatggatccgtccaacgtcaaccagatcgccgtcgccaaggaggtcgaggagcgccccctgcgcggcacgccgctcacataccacgcgcaccatcgcggcagcaacgcctcgatccacaactggcagcgcacgcgctacgagcagggcttcgacgaggcccatcccgatccgcagggcggagatgagggcgatgccgagcagaagaacgctgaagacgacgcgtaatgacccggtagattacggtccgcgcaggaatacgcggacagcgtcccacagcctgacccgataacggccgggccggcactccccgacaggggatgcgccggtccggccgttcgatattccgccgcggaaatgcttcacaaggcggcgcatgggacgtacaatcggggcatggccaaaggcgacggaaaatcggacaagacagataagccggacaagtcgggcaaaggagcgaagtccgagaagacggacaaacgcatcgacaaggtactgcggctcgccacgaaccgcatcgaaaccatcgaatcgagcacgacggtggctgaacgactcgcgaacgccgccaaatccagtgagctgctcagcgctgtatggtcgctgccacccgcgcagcgtctcatgttccatcacggcgtgcatatcgacgatgtcgccggagactccacacccggcttcccaggtggcagggatgacgctgaacggttcatcacgctcagctcatcggagatcgcccgatatcaacggctgctgtatgcgaacggcgtcaagggctcgcgccgccggctgctcatcgtgctgcagggcatggacgcctccggcaagggcggcatcgtgcgccacgtgttccggcagggcgacccgatgggcatccactatcacggtttcggcaagccgaccgacgaggagacgcggcacggcttcctgtggcgggtggaacgcgagctgccaaagaacgggtggatcgcggtgttcgaccgctcgcattacgaggacatcgtcatgccgcatgtgtacggcacgtatcccgaggccgaatggcgcggccggtacgatctggtcaatgagttcgagcgttcgctggcggccgacggctgcgcgattctcaagatcttcctcgtcgtgagccaggaggagcagaagaggcattttctcgggcgtctcaacgacccgaccaaatactggaagttcgacatgtccgacctggatgcgcgcgaacgctgggacgactatatgggcgcgtggcaggaggtgttcgagaagaccagcacgcagactgcgccgtggtatctggtgcccgccgacaaccgctggtactcgagggccgtggtctccgagctgctgcgcaccacattgaagaacatgaacatgacatggccgggactcgacccggacgtcgatccggacgaggttcggcggctgctggggtgaacttgcgcccgccggtcgattccgcgagctgcgccggcgtgtagactgggaaccactatggcagatacagaacattatggttcgctgggggcgctggcgcccgcgtgggacgagggcgagcgcaacatcgacacggacgagatctacgagcggttcttcggctgggtggccgacgtcaagggtgtcgagccgtggcctcatcaggaagaggccatcatggacctgctggcaggcgaccatgtgatcctcaacacgccgaccggctccggcaagtcgctggtggcgcttggcatgcacttcgccgcgctgtgcaccgggcggcgctcctattacaccgcgccgatcaaggcgctggtctcggagaagttcttcgatctggtcgaggtgttcggccgcgacaacgtcggcatgctcaccggagacacgcatatcaacgccgatgcgccgatcatctgctgcacggccgagatcctcgccaaccaggcgctgcgcgaggggcgtcgcgcggacgtcggctgcgtggccatggacgagttccactattacggcgactcggagcgcggctgggcgtggcaggtgccgctgctgacgctgccggacacgcagttcctgctgatgagcgccacactcggcaacgtcgacgcgatcgccgacaagctggaggacatgaccgacactgacgtggacgtgatcgccgacgcgccgcgcccggtgccgctcacttacgagtacacgctcgatccgctggagaagaccgtcgaactggcgttccgcaagggcgagacgccgatctacgtcgtgcatttctcgcaggatgcggcgctcgacaccgcgcagtcgctcgcctcgaccggcgtgtccagcaaggagcagcgacaggccatcgccgaggccatcaagggtgtgaagttcacgaccgcgttcggcaagatactgcaacggctgttgcgtaccggcgtcggcatccaccatgccggcatgctgccgcgatatcgtcgtctcgtcgagcagcttgcgcagcaggggctgttgccggtcatctgcggcaccgatacgctgggagtcggcatcaacgtgccgatccattcggtcgtgctgaccgcgctgacgaagttcgacggcaccaagatgcgtcgcctgcgcgcccgcgagttccatcagatcgccggccgcgccggccgcatgggcttcgacacggagggactggtcgtcgccgaggcgcccgaatacgagatcgaaaacgccaaggccgtcgccaaggccgggaacgatccgaagaaactcaagaaagtcaagcgcaagaaggcgccggaagggttcgtcacgtggaaccagagcacgttcgacaagttgattgacgccgcgccggaaacactcgtcccgcacatgaagatcactcattcgatggtgctcaacgaggtcacgcagggcggtgacgcgcgccggcgcgtcgacgagctgatcgacgactccgcgcagacgccggaccagaaggagcatctgcatgaacgtgccgacgagatattccagaccctgttcgacacgaaggtgatcgagaccgaagagcgcgacgacggtgggctcgactacttcctcgacgtggacatgcccgacgatttcgcgctcgaccagccgctcagcccgttcctgctcgccgcgctggaactgctcgaccctgaatccgacatgtacgcgcttgacgtgatttccatggtcgaggccacactcgaagaccccaagcaggtgctgcgcgcgcaggagcggcaggcgcgcgacgccgcgatgatccggatgaaggaagacgggctcgaatacgacgagcgcatggacaggctgcaggagatcacctatcccaagccgctggaggacatgcttgacgcggcgttcgatcagtaccggcacgacgtgccgtgggcgaacgactactggctgagccccaaatccgtggtgcgcgacatggtcgagaccgcctccgacttcaccggatacatctcgcggtacaacatcgcccgctcggagggcacgctgttgcgctacctgtccgacgcctaccgggcgctcgcccgcaccgtaccggacgacaagctcgacgatcagctgcgcgacgtgatctcatggctgcgcgtggtcgtgcgttcgatcgactccagtctggtggacgaatgggagaacgccggcgcgtccgatgatgcctcgcaggcggccgccagtctggccgcgccgggcgcgaaggccgcggtggtggaggaccggcgcgggctcaccgtgctgatccgcaacgcgctgttccaccgcgtgcagctcatggaccttgacaagcccgagacgctcggcgctctcgacaaggagtggggctacggcgtgcatgagtgggaggacgcgctcgacgacttctacgacgaacacgagtacgtgaacaccgacgccaaggcgcgttcggccgagctgttcatgctcgacgagaagcacgagaacgatgagcacagctggcacgtgcgccagatcatcgacgactccgacggcgaccacgactgggccatcaccggcaccatcgacctggacgcgacgcaatccagcggcgaagtcgtcttcttcgactacgccgtcaccaacgactgacgccgccggcccccgccagcgggggctggcgcgaagcgactgagggtggtccgtccggtatcgaacctatgttcgatgctgtgttgtagagtgtaggcatgactgagaatgatctgttcggggcggcggatgtgcccgacgatatgacgcgaccgttggccgtgcgcatgcggcctcggacggtcgacgaggtgttggggcagtcccatgtgctggggaagggctccccattgcggcgtctggcgaatccctcgtccaaggggtcgctgaccgcgccgagctccatcatcatgttcggacctcccggcgtgggcaagaccacgctggcgaccatcgtcgcccgtcagtcggggcgcgcgttcgaggagctgtcggcggtgacatcgggggtgaaggacgtgcgcgacgtgctcgcccgcgcgcggcgcagactcgtcggcgacggcacggagacagtcctgttcatcgacgaggtgcatcgtttctccaaatcgcagcaggacgcgctgctgcccgccgtcgagaaccgtgacgtcaccttcatcggcgcgaccaccgagaatccgagcttctccgtcatcaaaccattgctgtcacgttccgtcgtcgtcaaactcgaatcgttggaaccgtccgatctcgccacgctcatcgcacgcgcggtggaagacaagcgcggattgaacggcgaagtcaaaatcgacgatgcggcggtcaacgagatcatccgcatggccggcggtgacgcccgcaagacgctgacgatcctcgaagccgctgcaggtgccgtcaccggagacaaggcccgcaaaaaaggcgcgcggcgcccgaccatcacgccggatgtggtctcgcaggtcatggacgccgccaccgtgcgctacgacaaggacggcgacgaccattacgacgtcatctccgcattcatcaaatcgatgcgcggctccgacccggatgccgcgatacactacctcgcacgcatgctgcgagcgggcgaggatccgcggttcatcgcccgtcgcatcatgatcgccgccagcgaggaggtcggcatggccgcgccgcagatactgcaggtcaccgtcgccgccgcacaggccgtcgcgatgatcggcatgcccgaagcgcgcatcatcctcgccgaggcgaccatcgccgtcgccaccgcacccaaatcgaacgccagctacaacgccatcaaccaggcgctcgccgacgtggacgccgggctcatcggccaggtgccgctatacctgcgcaacgcgccgaccgcgttgatgaaaagctggggcaaccatgacggctatcggtacgcgcacgactggccgggtgccgtcgcgccgcaggaatacctgcccgaggagctgcgcggccgcgagtactatcatcccaacgaccgcggatacgagcacgaggtcagccagcgcttggacaaagtccgctccatcctgcacagtgaaaccgcgccggacggctataccgagtccaaagagcagaacggataaatcgccccgcccggcggggttgccgagcggtagcgaggctgggagtggttcatcgcaaccgccactccgccctcgtccggcaatccgttacactgtaatgtggcctgacgcagtgtgggtatcgtaagggcagtccggaaacaactggcgtcggtctgaatggatttcatcacatgacctcaacctcgcaggagcgcatccccaagcgtctgatcggcgccatcgttgccgtgggctcgctggcattcatcggcatcctcaccgaaacggtgatgaccgtgctgttcccggaactcatgaccgaattcggcgtgaacaccgccaccgtgcaatggatcaccaccgtgtatctgctggtggtcgcggccacgatgccactgtcgtcgttcctgaaccgccgtttccggctgaagtccctgttcatcgcggctgtggtcctcgccgtgaccggttcggcgatcatgatcgtcggccacaccttcccggtcatcctgctcgcccgcgtgatccaaggcatcggctcgggcgtggcgacgccgctgatgatgaacatcatcctcgaacagtcgccccgcagcaaggtcggccgcctcatgggcgtaggttcgctggtgatcacggtcgccccggccatcggccccaccgtcggcggcgcagtgtcgagtgttttgccgtggcgtgccatcttcgtcatcgccattccgatcgtgctgttggtctccctgccgctcggactgcactgcatcgagcagaaacgccccaccgaggacgcgcggctcaacccagtgcagttcgtggcgatagtgctcgccctgagcggcatgatcttggcgctcaaccagatgggcgtcgcggtcagcgctgcggtcaacggctcttcggcgacacgtcccgtcatcatcaccgtcgtgagcctggtcgtcggtgtgggctccctggtgttcttcggctggtcatccggccgctcgttctcgccgctgattcgtctggggtggctacgagaccgtgtcgtccagcttcatctactcgcgtacctgattctgccgatcgtcggcatcggattcggatacgtcatcaccaatctggcccagatgtcgcttggcaccagcgcgttccacgccggcgtcctcgtgctgccgggcgctctggtcggtgcgttcttcgcgcccgtcggaggcatgctgtacgacaaattcggcccgacgaagccgattctttcggtgatttcggtggccacgttcggaccgatcctgctgctggcattttccatgcggttgacgcctgcgctgctcgccggcttctacttcattttcgggctgtgctatgcgctgggattctccaacatcatgaccagtgcgctgagcggcatcgaccacgtgttcatgccggatggcaatgccgtgttcaataccgcattgcagttcggcggtgccgtcggcaccgcactgttctcgatgattctcggcgtggctcaggcgggcgccggctcggccgaaaaggggagtgccgcgttccgtcacgccacggccgtgggcggcacgtggatgttcgcgacgatgacggtgatctgcctgatcgcgatctgctcgcttgcctgcgcgttccgtatccgtgcgtcgagaacggctgccgagcgctgactcccgctccggggatggttcaggtcagagccatcccaccgccagcagcgcgacgacgtaggcgacgcacgcggctgcgaccattagatcgcgtcggcgcgcgcgcatcactctccaatgggtgcggtggatgccttcctcgtagcagcgcgcgtcaagcgccagactgagattatccgcgtgacgcagcgccgccacaaggatcggcacgatgatggcgaacagcgctttgacacgagtggccggcgaaccggtctcgatcgtgccgccgcgggccgattgcgcgtcgatgatcgccttggtctcgtcgctgagcgtcggcaggaaccgcagcgcaagactcatcactagagccatttcctgcgtgtgccagccgagctttctgaacggcaacagcagggagccgaacgcatccgtcatcgcggtgggggtcgtcgtcgcaaggaacacggcacccaggatgatcaccagcgcgagacggcacgaatacagcaccgcgaccatgagcccgccggtggtgatcggcagcgggccgatatgcgcaagcgtctcgccggagcgggcgaagaacatgttcaccaggcccatcaccgcgaatacgatcaggaacacgcgcacggaagacagcaaacgcagcggatgcagccgggcggccgccacgacgcatgcggtcaggacggcgcccatcgccagctgcgccggcctggtgatgacgaatgcggtgaacatcaacgtcaggaacgtcaccatcttcgcgcgcggatccagggacgctacgaatgacggacggttcctggatccgtcttcaatggactcgatgccggctttgccggcgttcgtggaagactcggtggcgtcgccgacgctggtgtcttcgtcgtctccggtgccgcaaccatcgccttcgccgtcgccattatgcgatcctatggtgatgatgtggtccgcgcagtgctcggcctcgtcgatggaatgcgtgatgatgagcaccgccacgccctgacttttcagggaacccagcagcgcgtggatgcgggaggccgccgattcgtccagactggcggtcggctcgtccatgatgagcacacgagggcggcatgcgatgacgcccgcgatggcgacgagccgctgctgcccacccgacaggttgaacggagaacggtcggcgagatgctcgatatgcagcatccgcagcgcctcctctacgcgggtggccacctccaactcgctcagatgctggttgcgtgggccgtacgccacatcctcggcgacggtgtcagcgaacagctgacgctccggatgctgcatgacatagccgacgttgcgccgcagggccgcgcgttcttttcgggtgagtgcgcgaggccgtttcccgtgtttcgacgacgcgaccggcaatccggccacggtgatcgatccggcggacgggcggtccaaggcgcacagcagacgtgcgagtgtggtcttgccggcgccgttggcacccatcagcgccacgatttcgccttcggcgacgcgcagagaaagattctcgaaaaccggggcgtcgccatcgtcataacgatatgacaggccggatactgcgatggcgtcggatgttgagcctgtaggtggaatgggtgatgcgtccgacttggtagacgccggttttacgggttgtccggatttcgctggttgcgcgggcgacgcggccgcggtggaacctccgggctcctcagctgccgactccgtggagcccgcagcgtcagttgcgtcagcgtggctccgcgcaatcacttgcttcgccgcaatcgcgtccctgtcggcttcgacctgcgtgagcagcccgccgtctatgcgaagtacgcggtcggcgtgcatggtctcgtcatgatgatgcgtgaccagcacgatcgtcgtgccacgccgttgcagcatgtcgaggatgcgcatcacctcgatccgcgcgtcgggatccagcatcgcggtcggttcgtcgagcaccagcatgcgcgggtccatcgccagcattccggcgatggcgatacgctgctgctggccgccgctcatgcgcgtcggatccgcgtggcgaaaccccgccatatccaccgattgcagggattcgtcgatgcgcccgccgatgtcgtcccgagccacgccgaggttttccgggccgaatgccacatcatcctcgacgatggtggtgacgatctgatcctccggattctggaacaccgtgccgatgccatgccgggcattgcggtattcgctcggattcgctgaagcggtctcgccgtcgaagacatgatggcccagcagcgtcatatcgccgccgtccggggctgcgagaccggcgatcagacgcgccagagtggatttgccggagccgttggggcccaccagacacagccgctccccgctgcggatggtcaggtcgatgccgtcaagcacccatgtgacgccgttgtcatagctgaatcgcacatgctcaagtcgtgcggcgggaaccatgccgttcatatcatccattcacaaaacatcgtggtcaatccatatcatagaggccattgtcaccgctgacggatgcagcccgccagagaggtcatcacccggactgtcggaaaaaagcctcgtgcgatgacccttttggcgggctgccctaggcggcgacttcgcgccgcgtcatgtcagcgattcagcaagttcgaaatcggcttgtacaccaggaacgtgaccacgccgtgaatcacgaacttgatcaggttgaacggcagcagcgcgggaacgatgatggccgccacctcggagaccggccagccggtgtagatcggcgtgatgaccagattgccggcgatggccgcgaccaaggccagcagggcaccgacgaccaaaccgatgacagcgcccttgcgcgtgtgcacgtggcgatagatgagcgccgccggcaccgacagcgacaaggccaccagcacggccatcagcgtgccccacgggtccatgaacacgtgcggtacgaagccgagcacactgacgatcgcggctgcggccgggccgtacgcgaagccggcgatcaggcacacgatgccggacggatcgtatttgaggaacgagaacgccgggttcggcaggatcgggaacgagatgaagctggtcgccatcgccagcgccacgaacagcgcgtacatggcgatgcggcgggtcgaccagcggccggaatcggcgacgccggtcgaatgcgccaaatccgggcgcgtcggcttggccgcgttcgacgaatcggctgaattgggttgcgaagatacactcatggtgagctccgtttcttccatccggactttgaccgttggctccggattcccaccggatcagccgcttgcgcgggtcgcgggctgccgcggccgccgttatgaatcccggctccgcaggtcaccgccagtaaggaattgcaccttccctgaaacttgcttgaccatgtatacgccggggtgtggatgattgacgtaacgttgcccacatagcgaacatgaggcatccatgcgcgtaggtggccccatccactacgttgtgccggttttcgcgctgtataccggcgcaattgcccatttcgacacgatttcgttatacaatttcgcgtacagccactatgacgtgcgtgtcgcacaccatccaacaggaggtcatgatgattgataccgctcaagcgtttggcgtggatatcggcggatccggtatcaaggccgctccggtcgacctgaacaagggggagttcgccgagcccaggctgaagatcctcaccccgtccgagtccaccccgcaggcgatcggatcggtgctgcgcaagcagctcgaacatttcgagattccggagacggctccggtcggcatctctttccccgctccggtcaagcccggccagaagctgaattggatcgccaacctcgaccagtcgtgggtaggcgtcgacatcaccgaggcgctgtccgaggagtgcggccgtccggtcacggtcgtcaatgacgccgatgccgccggcttggcggaacagcagttcggcgcggccaagggtcaggagggtctggtcgtcgtgaccacgctcggtaccggcatcggcacggcgctgatctatgacggcgtgctcatcccgaacaccgagctcggccacatcgagttggagggcggcaagggcgacgccgagcgctacgcatcctccgcggtgcgcgagcgcaaggagctcagctacaagaagtgggccaagcgtctgaccaagtactacagcctgatcgaaaagtacttcagcccctcgctgatcgtcatcggtggtggcgtgagccgcaagagcgacaacttcgtgccgttcatcgacatcgatacgccgatcgtccccgcgaagctgcgcaacgaggccggcatcatcggtgccgcctactacgccagcaccaagtagcgcagagggcacaggcacatacattcgcacgccacaccttggccgaccatcgtcccggcaatgcaggacgcatggtcgcggtagggtagtggcgtgcgtttttcttcccgagtagatctgagcgagcccaatcccatagccgcagccgagacacattgccggtgcgaaggcatgcccctgggcaagctcaacgattccaatcccacacgtcacggacttgcaccggcactggtgccgggcacgtacaccgccgacccgagaggcccgcggcccgcacgggaggcgctggcctccttcctgaccgagcttcaccggggcgccgaaggtgccggcaccgcgccggcggcggatccgaatcgcctctatctgctgagttccacgtcacaggcgtactcgtggctcatgaagctgctgtgtgacgcgggcgatgcggtgctcgcccccaagccggggtatccgctgatcgaatccatcgcccgcctggaatgcgtcgacactatcgaataccagctgcgtttcgacgggtcatggtacatcgacgtcgccgagttgcgcgcgctgctggacgggccgcagggggcgcgtatacgcgctttggtgctcatcaaccccaacaatccgaccgggtcctacgtcaaggcgggggagcgcgagcagctcgtcggcctgtgccgcgagcgcggtgtcgccatcatcgccgacgaggtgttctacgattacgcactggagccgttccccggcaatgcacggctcgccggcgaggcgggggcgctgacgttcgcgttggatgggttctcgaagatgctcgccgcgccccatgccaaggtcggctggattcaggtgtcgggccctgagacggacgttcgcgaggccatgcgtcggctggatgtcatcgccgacgactacctgccgatgagcgacatcatcgcctcccgcatcccggacctgttggaggcggcgaaggtccagaccgacctcgtgcgcggccgggtgcagggcaatctcagggcactgcaccgcatgctggagtccgacccgctcggcgtcgtctccgtgctgcgggccgagggcggctggaacgtgctgctgcgcgtgccgggcgtcatcgatgagaacgagctggtgctgcacatgattgacgcgcatggcgtctccggccagcccggctatttcttcgacatggcctcgaacggctatctggccatatcgctgctgcccgaaccggacgaattcgcgcataacgtgcgcgtcgtgctggactcggtggccgaattgctggggtgattgtcgaaggacgctctcaaaactcgcagatacagattccacgttttctgcgttttggccattttccgccgttttcgcgtaaaagcggaaaacgtatctgcgagttttgagagcgtgctttccgctatcgtgccactttggaccgaatcaggtcctcatagaacgcggccgcggcggcaggttccccgtcgaataccaccgcgtggtcgtcgaccaccagcgcccggtcgatcgcgtactgcggccgtgtgatcatgtccacgtcatgcgtggcgaaaatgacctgcttgttgtagccgaacagcgccttcgccacgtgggccgagccgatctcgtccaggcccttggtgggctcgtccgccacgatcgccgcgggggagaagctcaacgcgctggcgatggcgagcaggtgccgctgctcgctgttgagcgagctggccgactgccgagccacggtgctgagcccgaaatgcgcgaacaggttgccgacgatggccagccgctctgattcgggcaccttgtgctttttcaacggctggtcgatcgcctcgcggatggtcgccgcacggtagtaactgttggggatctcctcgcggcggacacgcccgacgatgtcctcgatgcgtttgagatcacgcttgacggcggagctgagcgcggtctcgcccgcggtgatggagacggatccgctcgtggcggccaatgctccgtcgagcagcttgagcagtgtggtcttgccggcgccgttcagcccgatgaccgccacgcgcctgtcgtcgggcgtgatcgtcagtgatgtgggaagaagcccgacggaaccgtcctcataggtgtgtccggcttggtccagcgtgaaggtcacttgcgatggcaaggcttcgtccttgccgaagagcgagtcaaaaagtcccatgactcctatagtagcggcatcggcgcattcgcatcggccttctcgtcatggcctgcgggcgatcgtcttcgcgtcaggcgaagtcgttgtcgaacatgtagatgtagtactggccgtcgggcagcagctggatggtgttgaagtggatccagtcccagctcccggatgcggccggatcggattcatcgatgccggagtggtcggtggaagccttgtaatcggggaacatctcgccgaagtcgacgagcttcgtcaccttgccggtgctcgtgttgaccttgatggcctggtcctgcacggcatggtcgtatcgtgtcaggtcggtggcgagggagacgatgttgccgtcatcgtcgagcgcgtagtcgtggtggaggatgaaccggtcacccaggtcgatgatcttctccagctttccgaaccggttcatgccgacgaaatgcttggtcgacgcggagaaccacatgagcccgttgtcgtcgaacagcagccgttgcgagcggtagcacggtaataatacgcagaggaaacgctatgtgttgtctggcgatttcctgaatcgcatgaatgtcgattatggcgggcggcttatacgtgtcgcggtccggtgccgtccgcgatacgcccgcgggcgtctacagcctgaaccaggcgacgaccgtgtcgtagaggaccggattgttgttgatcagcgagtcgtcgcggcccgggatgaagcaggccagcacagccaggatgatggatgccatcagtaccgccgcaaccagtccgcggacgcatgcgagcaccatcgggtgacgcttcgtgacgtctcgccgaggctcgttgcgttccgacggatcgggcgcaccagccgcgatcgcgtcgccaccgggatgcatgagatacagcatcggcgccagcgcggcgatcgccatcatccacccgaaatcgcagatgtagcgccatcccaggcccgcggtgtggctgtcgaacaccgccagcagcaccgccagggccagggagcacgtggcgagcccccaataacccgacctgtgcatcctgcgccgcaggaacggggccgccagcgcgagcagcagcagcgggcatgccgtgaacaggccgccggccatcagctcgtaatagccccattcgcggaacgccatgggcgtcatgccaatgaaggggaactccgacgtgaaccgcaacggcaggaacaggtaagcgcccaccgacggcaggaaattggccgtcggctgcacgaacctggtcatgtcggtgacggtcatctggtagtcattgccgaaatccagcggcgacccgaaccgggcgacgttgtaggccatcagcggcagcaccacgatcagggcggggatgatgacggcggccggcgctcgcagggcccttcgcgggggcagggagcggcttttcaacccctgcaacagcgaggtgatctgcggccagaagatcgggaagcacagcagcgcggacagcgcgaacgtgggccggcatccgaaattcgccgcgatgcatgccgcgccggcggcgagatagcgcagcgatagtggttgggcgcccgcgaccgaccagctgcccacatggacgtgctccctgcgcccgggatgccgttcgggtgtcgctttgagccacagccacaggccgagcgtcgtgaacatcagggacgcggcgaagggcacggagtagaaattcaggcggaaatgcagataactggcgttcgagccgagcaggaacatcacgatgacgatggacgtggccgccaccgatgcgttcgggcacagacggtgcgtcagccgtatcaccagcaggcatgcgaagacggcgaacaggaacatcatcagcagtatgcacacggacgtgggcagcatcatgccgccgggcgtccatagggacgttatcgcacggaacggcaggaagaacagcaccacgggcaccacgccgaaatacgaataccagtggccgccatagaaggcataatcccagaatatctgcgtcttgccggattcgaacagctgaccgcgcaccaggatgtcatgcgggtccgcagcctgcgccagctcgggggagaccggcagatccagccacacgcggccgttcagcagcgactgcgcgacatggtcgtactggtcgaagtcgtaggtgtagccatgcgggttggggaacaccagcggcccggagacgaggaattcgccgacgatgcgcaccgtggtatagatggccagcggggcgaggaatgccacgagcgcccaccgctgccgtacgctcgcgggattgagccgtatgcgccacaacgcggagtcgggtcgccacagcgcgaccagtagcgccaccgcggccatgatcgacacgcgcagccaactgaactcgaagggaacccgaacgttagctctgaccgcgcagaacgggatacgagagcccacgggctcctcgatccacaggcgaaccgagctgcccggcttcaccttaaggtacagcgagcgcggcgccgacgtggagacggaggtgatctcgccggcgcgcgaatcggtgtcggcgcgcacgaacacgttgttcgccgctttgacgtcgcctccttcgggcgtgttcgccgcctcgatgcgcacgtatgacgacgtgccgtccgcactcacttccatgtacgccgacgtcgggtcggtgacggtgaggatgccgtcctcgccgcgtttgagaccgtctcccatgacgttcgtcgccgcggcggaatcggtgctggcaccgagcgtggtccagaacggcatgttgaacgccacgcattcgatcaccaggatcgccagcagcgccacaagcatggctggcagtgaccgtcgcatgtggtctcgggaaatgatggaagaacgcaccccattattctatcggcttcatgtcgggttggattgaaagaatgtgtgccatgttccgaaacgcttcacacttcccgtcagaaggctctcttggagggctgatctcaggcctgtccggcgcgttgcgacaggtgggggacgccgccgcgtccgtactgggcgggcgtggcgttcgtatggacgaggacgggcagggaccgttcgaggcggcggtgcaggccgcggccgggttcggcaacgacacggatgcgatgatggccgcgctctcgaagcattcggtgagatcgacgccgcttatcaagcgccgcgtgtttcccgacctgcccggtgtcccgcgcggtgtggcgctgggatgggcgcagctgacctcgggggagggcgccaccgtctcaatagggctgttcatcgggcatgaccgtttctcgcagatcgcgctcgccgacgggaacgggcgcgtgttcgtgacctccgacccgcatgccgatacgcatgatatgaagccgcggttcatgctcgtcaaggaggaggagctggacgccgtcgacggcgcgagattcggtgcgaaggcgcggccgccgtctgcggtgacgggggcctcgaccggcgagccggcgggcacggtccgcgcgtttcagggcggcatcgtgggacgggacgccacagggcgcatgacatggcttgcctcgtggctgaagacgggaaaccggtacaccctggagcagatgcgctccccgctgcccgcctcgctgcggcagcgtctggagtaccgtgacgccatctccatcgccttcctcgccgcatacatgctgcccgaaatgcgggggctgctcatcgggttcggatcgggcaacatcttccgtcgcctcaatcgtgaggcgccgatgggtgccatacgccgcagcatacgcgacacgatggaggctcgagcgcacggcatgcgggcgtccggtctggaggatcatttcgccgacctgatgcaagaggccggcgccctcgaccatgcgtccggcctggaggcggtgcacggggccgaaccgctgcacctgtatacgtccagttactccggcgggtatttcttcgcgtgggactccggactggagttccgcgccgcgctgcgctcgctgagaatcgagggcaatctcaaccgtttcgccgcagtgagcgcgtggatcgaacgatccgcccgcaacggcggcgtgaccgaggacacggtcacgcgcgcgcaggccgcgcagatcgatctagcgctgctggacgatccggcgctgatggcgctgccttgggaagggaaccccgcgatatccggaatcgatttcccccacgacgacggcgtggcggcgatacgacacgtgtggcggtacgcgggcgagaccgctgaccggatgcttcaagacaatccgaatcccgcgggcgggcggctcggttccgacccaggggcgtcagaatgggtgtaccgtcaggcggtgtcccggctgctgcgccagctgaggctcccgtatcgcttcgacatggaattccgcagcaatctcgaacaggggacgaccgcggtggcgttcaccacggcgggcccctccatgatgccggaaagccgctatgacgagcgcgcccacgattgggtctcgttctcgcagggggaacgggccgccatgagcgccgcgtacaatctccgcgtcgggctcatcatcgcggcactgtgcttcggcgcgagcgaacgggtcgatcaggtgtgcgtgcgcatcgattccatcggtctggaagaggcggtcgccgagcaggacagcgcgatctccgatctgatgagcgcagcgctgcgatcgttcgagcgcctgcacacgggcgatgccggcgcgtccaaggccgatccgaaggacggcgaccatcacggcgatccttcgcatacgccttccgcggagccggcgtctgatgcccgcaccccgcaggcggatgccagaggcgcccaggacgcgaagacggattccgccggtgagtccgtttctgcgaccgtcgaggatgatgatctgcagtcgttggagagcttcgccgacatgatgaaggacatcaatttcgaagacttcgtacgggactccccgcaggaagtccaggactccgactccggcgatacgggtcaggcggatgacgccggagcggcccccggcggcgaaggcaacgaagagggcgacaccgaccccatggatgcgctgcgccgcagccccaccgtgcgaaacctcgtcaccgtaacgttcaccaggcaggagttgctgcagcggctgcgcgaagacgcgttgcggcaccccgccgacacctatcgcctgttcggcgcggtgatggacatcgacgagcggggcggactcgcccccatcagcgccgaattcgacctgcgcgacgcgaggttctccccgacgggctcccaggaggagccggaactgtcggacaaggtcttcccggcgactgtcgccggcatcctcggcacggacaacgccgagggcctgtccatccagcgggcggacctgctgcagcgctgcgtcgacgaattccaccggctcgccgccgacgggaccctggcgtcggtctccaaggcgcagcatgcgatgcatgtcatcgaccgcgtcgccgatccggagctgtccgaattgtcgtcacgcgtcaccagtgcgctcatcgacggtaccgacacaccggacttcaccttccagctggcggacgaactcgaccgggaacgcacgcgggcccgcgacctgctgttctccggtcaggacgatcaggccgtgaccgtcgccgaagcggccatcgaacgtgtggaatcggcttatgccgacaatccgggcgtgccacggtatttcaactcgtatgccgagcgcgtcgtctacaaccgcctgttcgccacggatggcgaacgcacggtgctgatccccgacaacctgttctacgcgcacaccgagctggcggacctgctgtctcagctcaagggcgcgaaggccgcgctgccgcaccttaacgcgatggtggcgtatgctcccgcttacccgttctcgcacatgaagctcgcagtgcagctcgcccgcaacgaggattgggattccgcgcgcgcggcatgcctgaacgcgctgcgcgtggcgctcgaccgtgatgacgccgcattcgcctactaccggctggcatacgcggaatggatgcgcgaccgtttcgatatcgccgccgcggcctacatcatgagcgagcacatcgcaccggggcagatcggggcgcttgacggcgagctgagggaactgctcgcacgcgccgaatcccaatgcatagcggtgcctaccgacgtggagtcggcagccggcgtgctgcgcatgcacgatctgccggtgtggccccacacccaggtcgccgcgatcgtgcgcgacgccgcccgcgtgtgcgtggacgagggcatgttcgttcccgcacggacgctgtcgatggcggccgcccgtatgaacgacggcgacaacggcggtgtcgacatggtgcagtcccagttcctgagatcgctcaactcctgatgccgtggcgcgggcgtcgccgaggcgggttcatgttttcgattacaatcgaatccagatgaattcgcacatacgaaggggaagtgatggctcgcgcagcggtttcgcaatcatccggcgaccagttggcttgggatttcgacgatccggacgctggggaggctccggcgccggtcgagaacgaaggcgccgcccggttcgcgcccggctcatcccagtgggtcgccgcgctgcagtccacggacgctgatgcggcccggctggatcggctggatgtgtcctcgctgtcgaacgaggttgcagcccgcctgtgggcacgcgtcgcggcgtgggtcgaggccgaccagatcgcctattacatcgatgacgcgccggtctcgtccgacgcggcctacgatgcacgcttgcgttgcctgcaacggctggaggcggagttcccgtcgttggattcaccgcagtctcccacgcaccgggtcggcggcacgttctccaatgatttcgcttcggtgcggcatccgtcgcgcatgatgagccttgacgacgtgttctcgatcgaggagctgcgcgattggtacgattcggtgctgcgcgatttggactggcctgagggcaagccgttgccgatgacctgcgaggtgaagatagacggcctggcattgaatctgatataccgcaacggcgtgctggaacaggggctgacgcgtggcgacggcgtcaccggtgaggacatcacgctcaatgtgcgcacgatcggctctattcccgccaatctcggcgggccggccgcggatatccccgagttcgtggagatccgcggcgaggtgttcatgcgttgggacgatttcaaggcgctcaacggtgaacaggaggatgccgggcgccctccgttcgccaacccgcgcaatgcggcggccggatcgctcaggcagaaggatccgcgcatcaccgccacaaggcggctgagcttttacgcgcatggcatcggtacgctgcgctggggctcggggcggcccgtcggctcgcatgacgtcgtcgccgaccagtccgaggcgtacacgctgtactccaagtggggagtgccggtgtcgccgcacaaccgtgaggtcacgtcgttcgcgcagatcctcgacatgatcgactattacggcgagcaccgcggcgacatcgagcacgcgctcgacggcatcgtcgtcaaggtcgacgatctcggcctgcagaggtcgctgggcgcgacctcgcgggcgccgcgttgggccatcgcctacaagtacccgcccgaggaggtcaacaccgaactgctggacatcaccgtgcaggtcgggcgtaccgggcgcgtcacgcccgtcgccgtgctcaagcccgtgtatgtagcggggtccacggtgtctcgcacgacattgcacaatccgttcgaggtcaagcgcaagggggtgctgatcggcgacacggtggtggtgcgcaaggccggcgacgtgattcccgaactggtcgggccggtcgtggaacgccgcaaggggcgtgaagacgacctgcgcgaattcgtcatgccggatcgttgcccgtcctgcggatcgaagctcgcaccggccaaggagggagacaaggacattcgctgcccgaacgtggaatcctgccccgcccagctgaccgagcgcatcatcaacctggcttcgcgcaaggcgttcgacatcgagcatctgggcgaccagtcggccatcgcgctgaccaacccggaggagaaccggccggattcgccggatacgttcgctccgaacatcaccgagattctcgtcaagcccggcgaggagccggagccgtacgagcccgtggagggactgcggctgccggaacggcagaagccagtgctgtcgagcgaagcggggttgttcacactggacgccgcggcgctcagggatgtgcgcgtgtggcgcgaggccgcgatcatcgagatccatgagacggtcacggccgacggcaagaccaagcgcactcgcaaacgcatcggtggctcgggcctatggcatcaggtcccggcgttctggaccgcgcccacgccggcgaagaagctttccgcgcgacggcaggctgcggccggcgcgccggccgacgctgcggctgagccgtatccgggatatgacgtgccggccgatgcggtggtcgtgcgcgtcgatcggaagaccacgcgcaacggcacggtcgacgtccccgtgtacgtccgccccggcgagaacacgcgcaagatgttcgacgagatggacaaggcccggcacgccgacctgtggcgggtgctggtcgccttgtcgatacgtcgtctcggcccgcccacggcccgtctgatcgcctccgccttcggctcgctggacgccatcgagcaggcgggcgtggacgagctgtcggccattgacggcatcggcccggaaatcgccgaatcggtggtcaattggttcgccgccgcccgtgagccgagggattggcggggcgagacgctgcgcgcctggcaggcggccggtgtcggggtcgccgccgccgagaccagcacgctgccgcagacgcttgccggaaagaccgtcgtcgtgactggttctctggagggattctcgcgtgattccgccaaggaggccatcatcgagcgcggcggcaaggctgccggctcggtcagcaagaaaaccgattgggtcgtcgtcggcgaaaatgccggctccaaggccgccaaggccgaagaactcggcatccccatgcttgacgaagcccaattccgcaccctcttggaaaccggcgccgtgcaatagactgccgcccctctccgctgacggagggctgtcgcggagcgactggggtggtccatgcctataaacccgcccctcagtctcgcttcgcgagtcagctcccgccggcgggagcaagtactcgccccgcgctttgcggcccatttcacagggtggatttcacgccgcctctggcacgccgtcgattcacacgctagtctggtacgcggcaataaggaggataggatacatgacagacgcacgccacatcgaggcgcagatctacgaacggctcagcaaagtcatcgacccggagctcggccgctccatcaccgatctggggatgatcgccgcaatcaacgcggtgggcgccacctcccagggcgacggcgacatgccgtcatatgacgtgaccgtgcatgtggaacttacggtcgagggctgtccgctgtcgcagaccatcaccaatcagatcaacggcgcaatcgtctcatatcccgacgcgaagctcaccccgcacatcgaggtctcatccatgagccatgacaagctcgccgacctggtggcgggtctcaaggcggagcgcaagcagaatccgttcaacaaaccgggcgtcaagacgcgcatcttcgcgatcgcctccggcaagggcggcgtcggcaaatcatcggtgagcgccaatctggcggcgaccttcgcggcgctcgggtacgacaccgcggccatcgacgcggacatctacggtttttcgctgccgaagctgttcggcgtgcacacgcagccgacgaacctcaacggcatgctgatgccggtgaccgcatggggcgtcaagctgatttcgattggcatgttcgccggtgccgaccgtgcgattctgtggcgcgggcctcgtctgcagcgttcgctggaacagttcctgtcggacgtgtggtggggggatccggacgtgctgctgctcgaccttgccccgggcaccggcgacatggcgatttcggtggctcaggcgttgccgaacgcggaactcgtcgtcgtcaccactccgcagccgtcggcttcggatgtggcggtgcgctccggtctggtcgcattgcaggtgccgatgaaagtacgtggcgtggtcgagaacatgagctggtatgagcataagggcgagcgactggagatcttcggcgcgggcggcggtcggcgtgtgtccgatcaactgaccgagacgcttggctatgacgtgcctctactcgctcagctgccgctcgaccccgatttgcgcgaggtgggcgagtccggccgtccggcggttctgaacgaggacggcgcactgcgctcggatgtcctggggcgcacgttccgggagcttgccgagggtcttcttcgcagcgaatgattctcaataagaaaggtgcgaggattgcgcacaaatacgcacagtcgcacattcctaggagtggcggaatagagccgtttctgtatatttcatgtgcgtttggccggcagccggactcgcacctttcttattgagaaccgttcgctgcgagccagtagtgcaaatgacgctgccggttgacgatgtcccggaccatctcgatgaaggcccgccttgattcctccgtccgcaggtcatccgcggtgaccatgatgatggtccagccattgtgctgcagctcgttgaaccgcgcggcgtccttgcgcatctgctcggggctcgcatgatatgcgccctgatattcgaatcccaccttgcagtcggggtaggccatatcgatcagtctggttccgtgcctaagcctcactcggtaattcgcatatggcctgccgagccccgaatctaagagaatgccgaacagaggtgtttcgggtggtgaatccgtgtcctcgacgatgtacgggagcgcctcctcgcattttctcttccccgcgaaacgggggctcgcgtcgaggtatgcggcgaagtcgtctttactggccttcttcctgcgttcctcgcggctggcaaacgccgaggctatcgtcgccagggcttccgtgtcgcagtaggttgccatctgcgcccatgccatggcgggggaggccatccagaaccgttcatattcgtatttgcagtattcctcctttccggagaacacatggaatgtgactccggcgatgtgattgcgatcctgtgcgcgaggcacactgacatggacgcgattcaacgccagatcggttttcggcacgggagctccccagtatcgtatggcgttgatatatccgaccctgagcggtctcttggtgcgcatggcggcttcattgcagcgtttgtgttcgttccgccgcccgttgactatatccgtgttcatgaatcccatggggcaacggtatggaatggaatgtgccgatggcaagcgatttcggggtatgtggtcgaaggctaggcatttttggcatgtcttcggcgtgttatccacattccatgtatcagcgaacggttctcattaagaaaggtgcgagtcggttctgcgggcaaacgaacatgaaattgatggaaacggcgttattccgccgatatgagaaatgtgcgattgtgcgtatctgtgcgcaatcctcgcacctttcttaatgagaatcattcgctgatacatcggggagggggaaagagaaggagggagaaaaagatgaggaggggaagagagaggaagagataatggaaaagcatctatcagatgtggaagtaggagcatcctttagcgcgatgtcggcgcaaaacgttggaataccgccataaacggcttcatttcgccgtttccaagggtttttacatgacctgtaaaactgctatcgccagccatgtgcggctatttccggttaggataactagacctgcggccggggcgcatagcactggatcatggaaaaaaccgatatgcgctgcacactcacattcttcgactccgccggcgaactgcaaccgatcatgctgacgggcaaaacgcacgtcgtctccgcgtatggccacacccagacgctcgccctcgccattcttcgcgttgccggctccggggcgtatgtctaaaaaccccgcgtgggttccataaggggctatgcgtccccgagcgcatgtcgtcgtgactgccgtgtcgtaggctcgtatcgtttcgcccacgcaccaattgcgtcattgcaggttgtagataatcgcgaccatgccgaatacacacaaaccaaactcaccaaccacggcaattgccgcgggccacagccaatacgcgccgcgatcatgctcaatcgcccatcgtgcgccatccagttcgttcgggatgacgaccgcggcgagcagcagcatcatgccgaatgctgcggcggccttcccaatccccgataaaccctcaaaggcaagcatacccaacaatggcacacccggagagaacaccgccagacgacgtgccagacggcccttcgcctcgtcgcccgcacgtttgcgcaggatgctccaaaacgcaagacccgcgaccaaagcggcacataccatcgacgtgagcagacctggaatgatattcgggtacatgtcagggaagtcctctccccaatcggcgtgcttcaacaccggttcggtgagcatgcccgccacacccaccggcatgagcaacgccgccagcagacagaacggacggcacctacggcccgtgaacccattgacaatcagaagagtggatacatgcagaggggtgcaggagctgaacatgaggaccacgatccagacgatgggacctccccaatcccccaaccaagtgtcgtgccaacgaaccccgaaccacgacagtatggccagactcgcacgctcgtactcgccatggccggtcaggtaataccatatgttcgccacatacacgccgacataccaagcgaacagcagaaccgtccgccacgccatgccacgcaccgtcgccggacgctccccatccccgcgttcgggaacggtcgtggcgaacatcgagaacacgccgagctcattgggctcgtcggaatcacgcctcctcccgcgccggcacccaccggccgaaccatcctcgtccgaaccgtccattccacgggacgactccagaacgggacccaaatccgaatcgtcatccatcaccatgcgttcccccacaaccttcacgatgccctcaaccggtttttcgaacatcattgctccattcgttgtttctgtctcatggtttttcgttccacccattcgtccagctcatcgtcggtgatgtcgtacatgatttgcagcagtttcaggcagatggtcacgtcggccatctcctcggccagattatgttccgagtcgggcctgccgcgcaatcgtttgctgacggcctgaatgagttcggcgcattcctccatgcacacgatggactgcttgtcccgtccgaaccgttcgacactcttgcaccagacggcgcgacggtcgacctgtccgtcgcgcatactgtccacgatgagcagagactcccgaagcacgtcggcgcgaccacgccaataaccagagccttcactggagcccgatacgctttcggccgagccaagcttgtcgataagacgctccctaagccaattcagattcttcaccgcgcccctccgtttcgtcgagtgtggcgtgaagcatcgtagtctcctcacagcatgtcttcaagtccgtcggtgacggcggccagggcgcggcccagccctttgcccatgacggccgccttcgcgccgtacagtccggtcagatacgcgtacaggcgggtcaggtcggcgtacacgcacgccgaacccgcaccctggccggccagaacatcgtggtgaacggccatcacctagcgccgggcatccgaacgtcgcggcaggccagccgggtgcgacggcgccgcaacgccgttggatcctcgcgatgcatagccgctgctatgacgaaaccgaagagaacatccgcatccgaaaatgacgtcgccgaccccaaggaagctctacgtgcccatcgagcaccgcccgctactgggagtgccggaggcggtcgccctgaccgggctggacgagaaggtcatccgactggccatacgccaaggcaagctcatcgcctgctacgtccattcgtcgaccaagcgcatccgacggcgtgatctggacgattggctgtccgcgttgccggaacggccgcgatgacgaaacggcccccgcgtggttcaaaacgaatcacgcgggggccgttctttgaaacacaactagaccataactagaccgagctatactggcagagtaaaaacccaaccggcagtagggctcaggggcttcgcctatcagatgtggaagtacagctcgtactccagcggggtcggggccaggcgagcctggtcgatttcgccgcgcttgaggtcaagccaggtctcgatcagatcgtcggtgaacacgtcgccggcggtcaggaagtcgtggtcctcttccagggcgttcagggccgcgtcgagggagcccggcacctgcttgatgttggcgtgctcttcgggcggcagctcgtagagatccttgtcgaccggttccgggggctcgatgtggttcaggatgccgtcgaggcctgccatcatctgggcggagaaggcgaggaacgggttgcaggacggatccggtgcacggaactcgatgcgcttggaagcgggggaggttccggccagcgggatacggatggcggcggaacggttacgggcggagtagaccagcgaaaccggagcttcgaagcccggcaccagacggtggtaagagttcagcgacgggttcgtgaacgcgaccactgcggaggagtgcttgatcagaccgccgatgtaccagcgggcgatgttggacaggccgccgtagccctgctcgtcgtagaacagcggcttgccgtccttccacagggactggtggcagtgcatgccggtaccgttgtcgcctgcgatcggcttgggcatgaaggtcacggccttgccggcgagcgctgcggtctcgtggacgacgtacttgtacttcatcaggtcgtcgccagcgtgctgcagggtgttgaagcggtagttgatctcctgctgaccggcgccggccacctcgtggtgggagcgctccagctgcaggccgaccttctgcaggttggcgaccatgtcgtcgcgcaggtcctggtagtggtcgcacggcggaaccgggaagtagcccttcttgatgcggttcttgaagccgatgttcggggtgccgtcctcttcggtgtcgacgccggagttccacggagcctcaatggtgtcgacctcgtagaaggagcgctgcatggagttctcgtagcgcaccttgtcgaagatgaagaactcggcttcgggagcgaaggaagcggtgtcggcgatgccggtggacttcaggtaggcttcggccttgccggcgacctggcgcgggtcgcgggagtacggctcgtcagtcagcgggtcgacgatggagaaggccacgtcgagggtcttgtgcttgcggaacgggtcgacgaaggcggtcgtgacatccgggatcagcttcatgtcggactcgttgatggcctggaaaccctgcacggacgaaccatcgaacggcatgccgtcggtgaaggcgttgtcaatgaattcgctggccgggacggtgaagtgctgctgaacgccgatcagatcggtgaaacgcacggagacgtactcgatgccttccttgttgatcagtgcttcgacctcttcaggcgtgtgggcgaaaatcttattctctgccacaatcgctcctttgttcttgagaacttgtttgagaacttacaatcgacaagtctagaaatgtgagtttcacgcgctcgtcaattgggttacgattatgtttcgagatgggcaacaggcggtgtaatccgcgtttttccaatgttttgggatttatgaaattcgtcgcgtctcagtgtcgcgtttcaagtagtggacggtctgacggttgtcggtcgggacccggccggatatgggaaagcccccgcggcgatgtcccgcgggggctttcccgatgtatgaatgatgccggttcggcgtgaggttgcccgccgaagatcagcggcctcgcatcgcgcggcggctgacgtgctgcatgcgcgtgggatcgatgcccttggggatgcccatgccgttcttggtctgcaatgtgcgcagacgggcgttcagtttctccagctcggccttggtgaggatgaaacgctcgcgcgggtggatcttcgccaggagagcgttcttgtggtgcgtcgggcggtacgccttgcggcggatgatgttgctgcgcagcttcttcagcggcacctgaccctggccgttgccgaccatcacacggtacacggggatctgcgagccggcggtgacgctcttgatggactgctcctggcggtccatcgcgcgcttgacgcgatcgtaatcgccttcaccgagcaggtagatgccgttgtatccggtgccgcgccaaatggcgtccttggtgcgcggatccacccacaccggctgctcggggaagttgaagccggccttgttgatgttgcgcagcacgctgatggccgcgccggtcttgccgtcgagctgcttgtatccgaccatgtcggcgcggcgggtgagcacgatggtcgccagcagcatgccgagcatgatggcgatgagcatgaggaacacccacgtcagcaccgtccaacggaatatgatgccgaggatgacgaacacgatcacgggcacgaggaacgcgccggagatcagcgccggaagcatcttgtcttccttgtgcgtgtacttgaagatcgttatgatctgtttgatcgtgctctgcttcttgggcttcgtctgcttggtcttctcgtccttgcctgccatcaacttcctcgcttggtctagggtgaacacactgagcgacaagtttaccagcagatgtgcccttctgccgaccatgagccgccgcgtcgctcgttcgcggtgtctttatcgggtgtgcagcggccggtcgtcggctttgagcagcgtctcgcccagcgtctcgctgaaggtgggatggggatggatgagacgcgcggcgtcggaaagcggggtgtggttgccgacgagctgttccgcttccgcgatgatgtcggatgcgacgggcgcgaccatgtgcacgccgagcacgaccctgacgccgggctgttgcgcacggatgccgctgacgagcgacagagatccgccggagtcgctcatcatcatgcgggcgttggacatcatcgggtacacggtctccttgatatcggagaggtcgtcgcgctgtttcgcgtcggtcgcggtcagtccgacgctggcggcctcggggttcgagaacacgatctgcgggatggtgtcctcatcgagcggctttggatcgagtccggcgatggattccgcggcgatgatgccctgctcgaacgcgcggtgagcgagcgcgtgcccttcggtgatgtcgccgacggcccatatgcctgcgaccggcgtgcggccgtatccgtcggtcgtgatgaatccatggtcgtcgacggtcacgccggcgtcacgtatccaaccgtcggaggtcagcggatcccgcccgatcgcgacgagcacgaattcgccttcggcgatgtgctcggtggagccgccgtccttggcgctggtgtagtgcacgagggctcccatgttgacgccggtgtcgatgtgggtcaccgtcgagcggttgatgacgtcgatgccatgtcgtttgagctcatgcgtcagggtcacgccggcgcggcgatcccatccagagagcacacggtccttgcggataagcatcgtgaccttgcatccggcggcgttccacatggaggcgaattcggcggcgatcgcgcccgcgccgatgatgaccgcgttgtgcggcatcgccatcgacatcgcccgcgtcgaatcgatgatcgcgccacggaacggctcgccgggcagctgccgcgggacggatcccatggcgagcaccacatcctgagcggtgatgtcgtaggacgggccgatgtcttccggcacgtccgagcgcacggaccgttgcacgccctgcccgtcagcagatgcggcgatgtgcacggtgatgggacgtgccgcgccggtgatcgaggcggcgccccggaacacggtgacgccccgatgggcgagcagacctgccagcccttgcgtcatcgtgtcgacgatgcgcttcttgtaatcgtgcagcgtcccgtagtcgatgccgttgatggtggcggagatgcccagttcgccggcgtgccggatggagtcgattgcgtgggtggcgctgatcagcgccttcgacgggatgcacccgcggttgaggcaggttccgccgagcgttgcgtcgcgttcgatcatggccacgcgtttgccgagctcggccgcccgcaaagctgtggaatatccgccgggtccaccgccgattatcgcgatgtcaaaagcttcactcatgttcgactcctttgtgctcgtaccaaaaccatccccatcgtaataccttacgccaaatcgcccccgccggcgggctgggctgtcgagcgcagcgagactggggtggtttcacgcagcctagggcatacaaaaaacggcgctcccactatcgggagcgccgtcaggaaagcagcagggaggctgtcacttcggccagttgccgtgcttggggctgcgcggtttgggcagacgccagcggcgcacctgaatcgcgcggctccaggcatacgatgcggagcgcgagcccttggcaacggatgcctcgccatacttctcgatgagcttcttcttcagcttgcgccacatgacagccacgtcgatgatcacggcaatcaggtacacgtacagcagaatcatcatcgggaccgacagctgcggcgcgatggtggtgacgagaatcgagccgagcagcatgatgaacgcaaccgggatgaagaactcgccgaggttgcggcgcgcgtcgacgtagtcgcggatgtacacgcgccacggcaaccgttcggccttcggcatgcggttgatgtcgccggtgcgcatcgcctcgtactcttcgtcctcgcgcttgcggatccgctccttcgcggccttggcgctggccttgcggtccggcggcaccagaggacgcaggttacgcgcctgcgcctgcttcatcttgggggtcggacggcctttcccgacggtcttggcgggcgattcctcttcgattggctcctgggccttgtccttcttgaaagggttccatgtcataatccgtcagaatacggccacgcctcgacgctggaaagccgggcgaaccggttacaatggcagctgatatgaccatctgttccaggccggccggttcgtgccggcgggatggatgatgacgaacgcaacagtaaggagcatcatgaccgcagtgttttccgacgagctgcgcgcgcgggtcgaagccgatttcggccgcgtcgtcgatctgctgggccgtaaggtcgcgctgaagtcgatttccgccgagggcatcaccgccgagcatatgaagcggtccgccgaattcgtagcggacgagctgcgccaggtcggcatcgacgcgaaggtcgtccaatcgcgcaacccagatggcacgcccggtgcatgggaggtcatcggctcgaagatcgtcgacccgcaggcccccaccgtgctgctgtacgcgcaccacgacgtgcagcctgtgccggatccgtccgcatgggacactgacccgttcgtcgccaccgaggtcggcacgcgcctgtacggccgcggctcggcggatgacggcggcggcatagcgattcactcgggcgcgttgaaggcgctcggcgacgatctcaaggtcaacatcaaggtgttcgtcgagggcgaggaggagatgggctcgccgagcttcatcccgttcatcgaggatcatcgcgacgagttcgcgtccgacgtgatcgtcgtggccgactcgggcaactggtccgccgagattccgtcgctgaccacgtcgctgcgcggcaacacctgtgtggacgtgaacgtcaaggtgctgcaccatccggtgcattccggccagtacggcggccccatcctcgatgcgaacacgctcgccgcgatgctcatcgcctcgatgtacgacgccaacggcgaccttgctgtgccgggcgtggccgcgcaggagccggtcggtggcctgcagcgcgaccttgacgaggccaccgtgcgcgaggacgccggcatcgtcgactcctatcgtctcgccggcaccggttcgctcgcttccaggctgtggaccaagccgagcgtgaccgtgatcggcttcgacgcgcatccggtcgagggctcattcaacgtggtcagtcccgagaccacgttccgcctgtccctgcgcaccgcgccgagccagcacccgcaggaggcgcaggacgcgcttgccgcgttcctgcaggcacacgccccgttcgacgccgaggtgaaggtcaccaagttggagaacggcatgggctgggcgatggacccgaacgcggtcgccaccaaggatgcactcgcggccatggaggaggcgttcggcgtggcgccgatcaacaagggcgagggtggctcgatcccgttcatccctgagctgcagcgcatcttcccgtccgcgcaggtgctcgtcaccggcccggaggatccgaaggccaacgcacacagccccaacgagtcgatctcgctgcccggcttgaagaacaacatcctcacggaggccctgctgctcgccaagctcggcgagtaaggccggcagctgcctccgtttccccgggaacaggttgggtggcatacccgaaacgggtatgccaccggtgtgctgcgacgatgcggtgccctccgttccggtagccggcggcgtttttttcggttgcccgccgtggctcttttggtggtgcggtgaacaatagagggaatgaacacatactccgaaccggatcatttgaccggctattgcgccgatgccagagtcgccatcgtcgacaatgacgagcgcgccttggagtctgtagtctcgctgtttgctgatcgcctacctcaaacgatgttatctggtcgacgactgaggggttgagagcaatcaaatcatgcaaggagcatgagctcaagccggatctgctgcttcttgatatgtcatcggaaggtatccaggggccttcggtatgtcgtggcatccgtagattcgatgggagggcctgctatgaatggacttcatagcatcatatgatgggtgaatgggatcatcgaaccaaaggcggtcgaggatgaaaaaacggcgtaatcgcggcaaaaacggcaaaacagtcggcaatggcagcatctccaagactcgcaatagcggacgtatatctgtgatatggctgctgctggccgtggtggtcgcggtgtcgctgacggtcggggcatgcgctttgtggctgcccgaccgggcacccgcactgctcggctccgccaaggagatcacgagcgcgccggccggagtgcaggagtacacgggagccacccaggtcaccatgattcccacggtctctcagacgcgcgaactggtcggcaacgcctccggcacagtgacggaggacatgtcatcgcagggattgacctctggcaagaccgcgatgaaggtcaacggagtctcggtggtggcgctggcgacagccacgccgatgtaccgcgacctcgccaccggggacaaaggcgacgacgtgctcgcactcaacaacgaactcgcacgcctcggactgccggcctcggcgaaatccaccacatatacatggaacacgtctcaaggagtgaagcagctcatgagcgccgccggcaacacgtcggacggttcattgccgctgaccgacgtgctgtggatacctgccgcgagcgtgcgggtcggcgaatgggccggcactgtcggggcgaccgtggccgggggaagcgtcgttgggaaggtgcccggcagtgtcacgaaattctccatccagaacgggcagccgtcggaactcgaccggacggtcaccctgatcgggcagaccgccacgctgaaagccggcaccaccgaagtggatgacgccgagttctgcgccagagtcgccgccacacaggaattccagtcactcaccagcgacatgctcgccacaggtctggaagccagcgtgcagcttgtgaatccggtgcaggcgctgcgcgtgccggccgcgtcggtgatcggcgtcaacggcagcaaggggtgcatcgtctcgggtggcaggaccatcaaggtgtcaattgtcggatccgagctcggggcgagtctcgtcgagccccaaggcgccgatgccgcggctatcacctcggttgagataggcagtggtttgaccggcgaaagctgccgatgatgacgggggaagatgtatacgccggtgccggagtcggtgccgcgccgcagccggagcgatcggtgagcgtacatgatttggcgcataggttccccggaacggacgtgttgttcgaacatctggatttcacagcgatacccggccagaccgtggcgatatgcgggccatccggatgcggcaagtcgacgctgctgtcgattcttgccggatgggagaagccgtaccatggcacggtggaacgcaagaacgtggaacgtgtaggctgggtgtttcagaacccgtacggcgtgcccgggcgaacggctctggaccatgtcgtgttcccgctgctggccaaggggctgcgccggcgcgaagcggagccgcaggcgttggaggccatggggctgttcgacttggagtatgcggccgaccggcggttcagcgaactgtcgggcggcgaggcgcagcggctcatgctggcccgtgcagtatgctccagacctgacatgctgctcgtggacgagccgactgcacaattggatacgcgcaccgcgcactcggtgagccacgtgctcgggaacctggtcggacagggcatgatcgtgctggtcgccacccatgacccggacacgcgcgacgcctgcggtcgcgtcatcgacctggccgactacgcccccggcgataacgaggactccggttttgcccccgctggcggaaacgaacccgctgagcctaccgatcccgcccccgctggcgggggctcccgcgaagcgggtgggggtggtcccaccgactcaactgacatcgccgaaaatggatcggaggtgcgctcatgagactgggatccatcatctcggagacgctgcgcaacatcgcctcgggcaccgcgcatgctctcgccatgttcctcgccgtgctgttcgccggcaccctgctcggaggatacgaggcgatgtcggtcatggggttggaaaccgaagccgcggtgcgcatccgcgcattcgccgacgtgaaaaccgtggtcggcggcaatgtcgacggactcgcctgcgaccggctctccgaccatggcgacccgtcgttcatttccggggcgatgcggtccggcccgcaggtcgtgccgctggcaacgaatggcatcgaactgtcatcatatgaggtgaccgcgggcatgatacggctcatcaccgccgaagacccgcaggaggttccggactcgtccggcgtgtgggtgtcatccgacgtctcccatgatttcggtctcgtcaagggcagccgcatgcagacgaatcatggcacggtcaccgtggcgggcgtgttcgattggccgaatgacggcagggacatgcggttcgcctatgcgatgatcgcaccggcggcatcgagcggcggcgtgttccaggaatgctgggcaaagcagtggccgcaaagcgaccagatggacgagctgctgctgtccaccgccacgaagaacccgaaatcggagatgcgtcccggtgtgaccgctcttaacaaggggttcgatgcgcattatgacgcgcagaagggctatctgacccgtgtgacccgttggatgccgtatcttggactggtggtcggcctgctgctaggcgtgatttcggtacgccgccgccggctcgaatatgcaggcgcgttgcactcgggcgaatctaagggtgcgcagctgctcggtatcgaactggaatcactgatctgggcaggagccggcacgctcgcgacatgcgcgctgctctccgcgtacgcgctgcgcatgtcgcagtccgaccctcttgccgtgttgctggccgccgttcgtacgccgctcgtgttgctggccggagtgctcgtctcctcgctgttgacgggatcggtgatccgacagacgcagctgttccgctacttcaagaaccggtagcgcctaatcccgtgtcacttcgccagtcccatctggtatttcagggtcaacacgcgcgtcgcggaggccgtcaccttcttcgcgaaggccgggtcggactgcgcacgggcgatgataccgtcaagaatcggcgtcacatatgacgtatcgcctatgcacgccaaatcgccgccggcgtccaccagacgcacgcccaggtccttggtcgctatgccgctgaccgccgcggctgaaagggagtctgagatcaccacgccgtcatagccgacgctgccgcgcagcgtgccgtcgatgatcttgctggagaacgcggcgggcgccgacgagtcgatgcgctggtaggtcgccagcgacatcatcaccatagccggcttcgcctgcttgatcgtggtgttgaacgcgcctatctcctcgccatcaagcgtggtcgtggtgtcgaggatgccttcggtcgtgaaatcggtattgccggtcaccgcgcccaaaccggggtagtgcttgacggtcgcgccgacgcccgcgtcgcgcatgccttcgatgaacgcgatgccgtgctgcgcgtttccgttggaatccaaaccgaaatcgcggttcagcgcgccaatcggagcgttcgaggaacgcttgacctgcaccgtccccaataccggggccaggtcgacgttgatgccggcttgcttgagctggccgccccaggtctttgcggaggagcgcagcgtgtcggcgctcatctggccctgcgccaccgcggacggcatcgtgtcgaatccactgcccctgagatgctgcacctggccgccttcctgatcggtggagacgatcagctggttgccgctcggagcatagctttgcagcgcgtcagcggcggtcttggctgcggctgtgccgttgttccagttgccgatgagcaccacggaaccgacatggcgtgtgctgatgagggcgctgagatcggccggattgccgcctgcgaacatcggtgccatgatgagctgcccggcccgttcatcgagactcatcgtggcgatggcgcggctcgccttggccgcgggggagtcaccggctgccttctgatgctcctgagatttctgcggtttcggtgtgggggccttgtcgcggttcagcgtcgaagaggaggactgtggctgcgcgagatgttcgagcgtgtctttttgctgggggcgcagcatccaccatgccgtgcctgccgccacaagggccaccacgcagagcatggccgcgatgatggtgggggctgaactggggcgcggcctcctgccgccgtgtttgatctgctgcatcctcatatgcactagcgtaggccatcatgtgtagtggttgtgaaacggttgtacgacggctgtgttctcagctcagagcatgaccagctttcctagcctttcgataggcttgtatcatgtctttttttgatatgttgggtatgttcgatcccggcgacgggccacgcgggccacgtcgggactccggtgcgaccgatgacgatccggtgatcgtcgatgtgcaggcggatggcgacgatcatggcgagacgccatccgccggcaagggggagccgccgaagcgcggcgtgccgaggctcacgccccgaccgttgccgaacgggcccagcaaggggacgaagattctgatcggcgtcgtgctggcgctggttgtcgtcgtcggcctgttcttcggcctgtcgcagttcatcacggacctgatgtggtacggacagctcggttttcagaacgtggtgtggacccagctgggtgtcaagttcggcctgtgggcggcgtatgcgttgctgatggccttggtcagctatgtgtccgcttggctggctatccgcgctcgccccgattcgtccgacggctcgacgttccgcatcaaggatgacgtcatcgaagtgggcaagtcgttcagttccaagaccgcgcgtcgcgccgccgtggtcgtgtcgctggtcgtgggcgtgatgttcggctcgcagttcaactcgaactggtctgagatcctgctgatgttcaacgcgcagagcttcggcactgccgatccgcagttcggcatcgacaacgggttctatgtgtttgtgctgcccggtttgcggctggtgatgtcggccgtatcgatgctgctgctgatgggcattgtgttctccgtcgtcacgcatgcgatgatgggcggcatccgcttcaccatgccggtgcatggtcgcggagtgctcgctgtgaccaagcgcgcccgtcgccagatcggcatctggctgatcctcaacatgctggcctggtccgcgcgccaggtgatcggcgtgttcacgcatctgacccagcagggcgaccgcatcaccggcgccgcatacaccaccgtgcacgcgaccattccggtcacgttcatcatggcggccatcaccgcgatgctcggtgtgttcctcggcgtgtggctgatgcgctcccatgcgttggaaggcgccgccaagccgagtgtccgcgccgccgcggctctcaaggcgtggcgtacgccggtgattgcgatcgccgccgcgctggtcgtctcgctggtgctcaccgtcgcatggccgatgctgctgcagcggttcaaggtgaacccgaacgcgcaggagatggaatccacctatatccagcgcaacatcaacgccacgcagcaggcgtacgggctcgacaaggtgaaggtcgaacagtacaaggccaccaccaagggcaagtccggagcgctgtcgtccgaggccgaatccaccgcgcagatccgactgctcgacccacaggtcgtcagccccacgttcaagcagctgcagcaatcgaagcagtactacacgttcgccgacacgctggccgtcgacaagtacgacatcgacggcgtcagccaggacacggtgatcgccgcccgagaactggatctggaaggcaacgacaaccgcaactgggtcaacgaccacaccgtgtatacgcatgggtacggtgtcgtggccgcatacggcaacaaggtggcggcggacgggcagccgcagttcttcgaatccagcatccccacccagggcaagctcaccgaatcgcagaagtacgagccgcgcatctacttctccccgaacgcccccgaatactcgattgtcggggctccgaagggcatggattcgtgggagttcgactatccgaccggatcgcagggcgcgaccaatacgtttgacggcgatggcggcccctcggtgggcaacatcttctcgcggcttttgtacgcggtccggttcggatccgatcagatcctgttctccgaccgtgtcacctccgactcgcagatcctgtacgaccgttcccccaaggagcgcgtcgccaaggtcgccccgtacctgacgctggacggccgcgtgtacccggcggtggtggacggacgggtcaagtggatcgtcgacggctacaccacgtcggacgcctacccgtattcgcagatgaccgatctgggaagcgtcacgcaggattccaccaccaagacgtcgaacacgatccaggcgttgggttcgcagaaggccaactacatccgcaactcggtcaaggcgaccgtcgatgcgtacgatggctccgtcgaactgtacgcctgggatgccaacgatccggtgctcaaggcatgggagaagatcttccccggacagtaccacccgatctccgagatatccggcgacctgatgagccacctgcgttacccggagaacctgttcaaggtacagcgcgagctgctcgcgaaataccatgtgtcgtccgccggccagttcttctccggcgaggatttctggcagacgccggtggatcccaccgaatcggccacggcgcagcagcagggcgttccgcagcccccgtattacctgtcattgcagaccggcgggtcgaagaagccggtgttctcgctgacctcctcgtacattcccgccggcacgtccacgcgagaaatcctcaccggcttcctgtcggtggattccgacgcgggcaacgaaaagggcgtaatcgggccgaactacggcacgatacgattgcaggagctgcccaaggactccaacgttcccggaccggggcaggcgcagaacaacttcaacgcgaacgcggacgtgtcgaaggagctgaacctgctcgaatccggttccaccaaggtcaaccgaggcaacctgctgacactgccgctgggtggcggtctggtgtatgtgcagccggtgtacgtgcagtccagcggatcgaccagcttcccactgctcaagaaggtgctggtggcgttcggcgaccaggtcggattcgccgatacgctcgacgaggcgctcgaccaggtgttcggcggcaattcgggtgcgtccgcgggcgatgccgagaattccggcaacacgtctcaaagcggtgacgggcagaacagtggcgggcagaacggcactgaatccggtgatggcagcgagagcaacggcaacgcgaatggcagtggtacgaacgagggcaaggaccagaacggttcctcctcgcagggcggcagccaaagccccgagcttcagcaagcgctgaaggatgcggcccaagcgatgaaggactcccagtccgccatgaagaacggcgactggaccgcctacggtgaagcccagaagcaactggaagaagccctcaacaaggccatcgaactcgacggtggcaagtaagagccaaaccagaaaaccccagtactgtgaacgcccccacaccgggggcgttccctatttcttgccccgctggcgggggctgtcatgcgcagcatgactggggtggttctcggcccagaacggcccccagtcatgctctacccatctgaccatctgattcgctcccagcccgtgtgccacaccaagcgaaaaacaccccaaaatcgcatggtgtggcacaacagagagccacaccatgcgatgtgagccttcacatcacgtggtgtggcaaagcacgggtcatgaaaaccgccattttccaatgatcggtggatgagcccggaatcacccttggccacaccagccccaaaaccctcaaaaatcgcatggtgtggtacaggcgagggctagatggcagtcggtcggtaaccatccccacaccttctcccgcggaagtcccatttgacagcgcgcaaatgggacttccgcgggagagaacctgactagtgggaaaggggaacctgactagcgggcggcgatgagatcgaatacgtgctcgactacgcgcgccgtgcaggagccgtgctcggggatggccacgttgcgacggatgaacgcctgataggcggcatggtcgaaatcgtcgtgctcgatggctctcacgatcgcctcggcatcatccgtgaacagcgtcgggatatcgcgcttcgggtcgatgtacaggctgcgtttcttcgaatagtccggccagtcgtacgcatagaggaacaccggcaggtcaagcagtccggcctcatagatcacggtcgaatagtcgctgatgacgtaatcggcgacgaacagcatgtcgtactggctcggatagtgctggaatacgtgcggattgttgatacgcaggtcgtccaacggatggcatttcacgatcaggttgtacttgtcgtaatcgatggcatcggcgagggctgctgccgcctgagtctgattggcgggcgtctttttgcggaacgtggggcagtagacgatgttgagcttgcgcccgagttccgggaactcgcggatgatgcgttcgcgctgctgcgcccggtacgagctgttgatcagcagatcggtgcggggcagtggcgcctcgtagatgatggacgggtcgatgtcgaagccgcgagcgtaatcgctgatgaacgatttggatgagatgagcacggacgtgtacccgcgatgcatgttcagcagcgaggcggtggagaacttccggccttccttggagcccaacgcggtgtatccgaacttcttcatgttgccgagcgcatgccacatctggatgatgggcacgtcgatgtagccggcgagcaggcttaccacgatggcgtaggtgtcgagcagcaccgcctggctggtggcgatgaaatacagctgccggatcatatggaacccgtatcgtaccgggttgtgcagcttcttggcgaggatcaccacggaataatccggatgcgtctgtctcacataatggcggatgagccggaaatcggtggtcggtcggtcgctctcgcgacttaggcacacaatcctacgcttgcgcgggaacgcgcggaagaacctatacataagaagcatcatcatccgaactgcattaatcagaagacgtttcattcttgttctcccttaccgaagcatcaggttggtgtgttagccggtctaccgtaactgcaactctatatattacatgggttaccacaaggggaaccgaagatgaatgacaaggtgtcgtaaaggagcccggggatgtcactggatgttcaccaaatccgctggcggtcaagttacttggagatcgactattcctcgcgggatggtggtgtgccgtggctgtattgcgtgggacgttgccagttcgttccgttcgagatcgtcgggcttgagagcggtgtccgccgcgcccgcctgaacctggtgctcggggacgggcgcgaggtgcttcccggcggccaatggatcatctgcgagaaaatcaaggagtcggcgctcgtcagtctgcaggcgctgtacgccgaatacccgctcatgccgcagcgcgtcgactacgatgtacgtcacctgctgcccccggagttgcgtgacgatgatgaggcggtcgcacagtacaccgacgaagagcgtctggaactggtggcccggcacccctatgtcaccagcggagtcacctacgacgatgaggtgctggagcggcttgacaatctcgaccgcgtgttccgctacggcaagaacagctacgcctatactggtgtgttcgtgcccaagacgaatcgtgccggtctcatctatctcgcgttgcacatgcagttcttccagcgcaacaagaccccgcgccaccgtcagcgcagtcgtcgccagatgcagaaggacgttttcgcggcgacgtactcggtgatgaccaagctggtgccgcgcaagcgcaatcgaatcctcttcctcaaggagaacggcgagggcccgacggagaatatggaggcgttgcagagccgcatgatcgagcgcggcatggacaagcgcttcgatattcgtgcccggtaccgcaacgtattcgcgggcaggcagaacatcgtcgcctggctgcgcgacctgttcgagatcgcccgaagccggtacgtcttcatcgacgattacacccctgtattcaacttcatcgaccccggtgaagatgtgacgctgacgcagatctggcatgccggcgtcggtttcaagtcggtcggctatgcccgttttggtctcaagggctcgccggatccgtacaattccgcgcaccgccgatacacgtacgcgctggtcggcaacgagcacctgcgtcgcatctattccgaggtgttcggcatcgaggaggaggcgctgctcgccacaggcatgcccaggctcgaccatttcctcgatgagaaggtcgagaaggaataccgcgaggagatggccgacaagttcccgtggtcggccaagggacgcgtcatcgtgttcgctccgacgttccgcggcaccggtcagcgcaccgcgtattacccgtatgacgagatcgacatggatcgtctgtaccgcatgtgtgtcgagacggacacgtatttcgtgttcgagatgcatcatttcatccgcaagcgtccggatatctctgccgagtacgccgaccgcatcttcgacctgtccgatgagagcctgacgaagctgttcttcatcgccgatgtgctggtgaccgactattcgtcgtgcttctacgactacctgttgctcaagaagccggtagtgttcttcgtgcccgacaagaccgcgtactcgctgatccgcggtgtgcagcggtccatcgacgagatggcgccgggcgtggtgtgcgatacgttcgacgagttcctggacgtgctgaggactcgccattatgagacggtttcccctcacccctcgtccatcgaccgcgccgccgagcgcagcggactcgccagcgaccgtgccatcgacactattatctacggcaaggatgttccgggtgtgcgcaaacaggcctccggtaagggaggcgcggtgccggtccggcagtccgacaagtcggccaagtccgaaaggaaggcaaaggaactgctggattccaaggtcgccgacaaggataccaagtccgcctccgacgaggaggagtgagcgtgccggggaacacgagcatggccgtcgcgcccgccgccggcgccggtgagcccggcagtggctccggcgagactgcccggcacgcggcaccacgcggcgccgggcgcccatcatacgagctgctgtccaaataccgcggcgtgctgatgggcgtgcagatcctgctgatcatggcgttccactacaccgaggacctgtcgaacgcggccgaccatttcaacggtcccgctcaggtgttctacgactatatcggcagttccggcgtcgacatgttcctgatgatctcggggctgggcctgtactactcgtggaagcgcaacccggacgcgggggcgttctaccgcaagcggctgacccgcgtgctggtgccgtacgtcgccgtggcgctggtcgggtggatctggttcgacttcgtccattcggatgccggagtggtgcgtttcctcgccgacatcgcattcgtcacgttcttcacggacggtgtgaagtggttctggtacatagcggtgtgcctgatctgctatgtgctgtttccgctcgtgttcgccgtcgtggacggtacccgaaacgtcgccgcggcatgggcgcgaacgttggcattgtgtgcggccgcggtgctggtcgcggtggcgctgtacagattcgcgccgtctttctacgacaacgtcgatctgatcgtcaaccgcataccgtgcttcatcttcggcgcgctgctgggaaggctctcgcatgaacgtcgtccattgcccatgcccgtggtcgccgcatgcctgacggccgtggccgtcatgctctacccgatgcagctggttgatgtccctctggtcaaggtgtaccttcgcgcggcgttgaacctgctgttgtgcatatgcggcgtcgtcatcatggacgtgatggcccgcgcgggaaagcccgcgctcgcaggccttcacgacgtggtatcaaaagtgctgagctggttcggacggtattcgctggaactgtatctgcttcacgtgatgattcgcaagatgctgaacctcaacgacctgccgaccacgcacccgcgctatgaggccgtcgtgatcatcggcgcgatcgcgctgtcgatacccctgaaacggctgtgcaacctgattcagcacaggctgctgcgtgggaaacgtttacttaatgccaaagagtataggggcacatatgcggcttgatgcaccagcaggcgaaaaaatggctgtattcgtttcacatgcctttgttctatatttgaaccctctgccggtacctcacatagatggcccgttcctgttcggcccgaaccgtttcttccatgactacctagagggacgcaatatcgcatttgaggatcaagagttgcaggtggatttctcttccatgaatgagatgggaataacattcatggaagaatggaacaagatgtacactgggtgaggcgcaatcaaagctgtctgtcttcaaagagaaagatgtccgctattacgccgatgactatgccgcctatgtgggccagatggtattgggttgcgagatcggcgccgagcgtattcttgaacaccctgatatcgaacgtttgaaaactgagaacaagaaactatccgagaagcgaaagaagctcgaagcggatctcaagaaatctcgcgccgaggtccagaaactccgtaactcgaagtcgtggaaggtcactgcgccactgcgggcggtcatgcgcctgtttggaaaggactgatggtgatccgtcttagtgcactctgcgtgccgaataccacagaaaggtgaatgctcggtaaataagtcgtgtctggaacatagactacgtatgagttaacgggggcgcaagcccgaaagcgcatataacagtggagagggcatgaacatcgctgtcatttttgcgggcggcaccggccaacgcatgaattcgcgaaccaagcctaagcagtttctgctcgtgcacggcaaaccgatcatcatctacacgcttgaggcgttcgatcagcatcccgacatcgacgccatcgtcgtcgtatgcctgaaggaatacatcgacgttctcgaacagctcatcaccaagttcggcgtcggtaagatcgccgcgatcgtgccaggcggctcatccgggcaggagtcgatccgcaacggcgtcgacaaggcgaacagactgtatcccgcggattcggtcgtcatcgttcatgacggcgtcaggccgctgatcgaccagcagaccatcaccgactgcatcgtcagtgtgaagaagaacggcagcgccgtcaccgtcgtacccgccaccgagaccatcgtgcaaagcgaggacggcgtgatcaccaacatcatcgaccgcaaacagtgccagctcgcccgcgccccgcagtgcttccgcctcggcgagctgcatgacgcacaccacaaggccgtggaagaagggctcggcgacttcatcgactctgcgtccctcatgtcgtactacggccacaaactgtacgaggtggaaggcgccaactcgaacatcaagatcaccacgccatcggacttctacatcatgcgcgccatcatggacgcggaggaaagctcccagatcttcggtctgtgacacgaacacggaggacaacgaccatcatgtttgatctgcaagaggaatatgcgtcactggcgcagcatctcgacatcgactgggatgcgctcgccggccggcatgtgctcgtcaccggcgccacgggccttatcggctcgctgtgcgcccgcacgctgctggaacgcaaccgcttgacgggggcgggcatcatcgtggacgcgctggtgcgagacccggccagggcacaggccatgctggggcagtacacggccgacgacgggctcgtgctgcatcagggatcgctcgaagatgtcgactcgctcgacctgccggcggactatgtcatccacaccgcctgtccgaccgcatcgtcgttcttcatgtcccatccggtcgagacgttctccgcgatcgtagacggcaccaggtcgatgctggaactggcacgacgccgcggcgcggcctccttcgtctacgtctccagcatggagatctacggcatgggcaacaagcagcgcggcacggaacacctgcttgacgagagcgccgtcggctacatcgacccctgctcggtgcgcagctgctactccgaaggcaagcgcgccgccgaaaacctgtgcgtctcataccattccgaataccaggtgccggtcaaggccgtccgcctggcgcagaccttcggcccgggcatccctcgcgacgacgtccgcctgttcgcggcgctcgcacgcaacgccgtggccggcaaggacttcgtcatgaagacgaccggcgaaagcacacgaatgtactcatacaccgccgacgcggtgtccgccatcctcaccgtgctggtcgcgggggagaacggcgtctcgtacaacgtggccaatccctccacctactcgtcaatccgcgagatggccgatatggtgtaccgcgaattcggtacgggcgacgcgcacgtcatcatcgacgtcgacccgaacgcgccctacccgccggagcaccacctgccactcgacgtgtcacgccttgaggcgctcggctggaggccgcaggtaggtctcgaagacatgtaccgcaagctcatcgcatacatgggctgacctcgcgggagaccgcacctgaccatgagaagacaagcagatttggaagaacattgtttgcaacactgaagcaagtcgtcggcgagaactggcattggcgacggcaggtctggaatctggcgaagatcgatctggtgaagacgtaccgcggtgccgcgctcggcaagatctggctgttcgccaaaccggccgtgtacatcctggttttctgggtggcactgaaattcggtctgcgcagctcgtccgacgtcaacggcaagccgttcctgctgtggctcgccgccggtgtgttcccgtggttcttcatgtccgacatgattactaccggcagtgacgtataccgtcgatacccgtatctggtgaaccgcatcaaattcccgctgtcgctgatctccacgttctacacgctgtcgctgctcatcatcttcgcgtgcatgatggcgttcaccatcgtggtggcgctgctcaccggcgtgcatcttggccgctacatgctgcaattgccgctggtcatggtgttcatgttcctgttctgggtggcgtggtccatggctttgtcgcctttgagcgcgatatcgcgcgatttctcgaacctgctcaagacgctcggcaccccgttcttctggctgtccggcatcctgttcgacatcagcggctggccgcgcaccgcccgtctggtggcgtccttcaacccggtcacatgggtcgtgcagtcggtgcgtgactgctttatctacaacaaatggttcttcacggattgggagtcgttcctgccgttcctgttcgtgctgctgatcttcgtcgtgctcgcgttgcacaactaccaccgtctgtacatggaggtgccggatgtcctctaagctcccatcgaatgtcacgcgaatgggcgatgccacggtcatccgcgacgaggacgcgagcaatcccgtcgccgtgcgcttcgaccacgtcaccaagcagtacaagctgttcaagaacgacaagctgcgcctgttgtccaccttctccaagcgcattccgcacgatacggtcaacgcgagcgatgacctgagtttcaccgtgaaccgcggcgaatccctggcgctgctcggcgacaacggcgccggcaagtccacggcgctcaagatgatcaccggcgtgtgcttcccgacgtccggcaccgtcgaggtgcacgggcgcgtgtccgcgctgctggagctttccgcgggcttcgacatgaagctgtcgggcatggagaacatcgacatgcgctgccagctgtggggtttgtcgaaagaggagtccaaggagctcattcccgagatcgtggagttctcggaactcggcaagtacatcgaccagccgatgcgcacgtattcgagcggtatgcgcgcccgtctgggcttcgcgttcgtgtcgtcgatccgcccggacatcctggtggtggacgaggcgctgtccgtcggcgaccgcaagttcgcgaagaagtgccgcgagcgggtcaacagcatcatcgccaacgagaacgtgaccgtgctgttcgtcacccactcgaccggcaccgcgaaggagttctgccacaggggcatcgtcatccagaagggcaaagccatgttcagcggtggcatcgaggaggccgtcgacttctacaccgcctcgtgacgcttcggccgtttcgctgacggcgttgccggcaagcggcacggccgacgtccattgaccgcgttcggtcggatggccgggacaactcccgcgtttcgcgattttgcggccgttgtcctgcggacgataacgcgggcatgtcccggatggccggaatttcgtggttttatgctggacaactgctgcaaagggctgttttgcggcagttgtatcgtgttcgtgctggacaactcccgcatttcgtgattgtgcggccgttgtccacgttcctgtcggcggatcgaggcgaatcgcgcatcatgcaccgctgacaccagtctcacccgccctatcccgccggcagggcggttgttatgcttgaagacatgtcctataccatccgtgcggccgttgacgccgacgttccggccatcgccgacatctacaacgaggcggtgatccgtgggggagcgtccgccgaccttgaaccggtgtctctggaaagccgtcgtgcgtgggtcgactcccatcagccacgcgccaagtatccggtcgtcgtcatcaaaggtcccgaaggcaccgtcgtggggttcggctcgctttcgaaattccatcagcgggccggatacgacggcatcgccgaactgagctactacatcgccggcgaccaccaacgccagggactcggcaccatgatggtgcgatggctgatcgatgccgcggcagagcgcggattcacgcatgtcacggcgatcatctacgccgacaacgccggctccgtcgcgctcatgcggcggttcggattcatccggttcggcctgcttcccgccgcggtgggcgcgctcgacggcaagctgcatgacatgagctattgggtcaaggcgttggcgggtggggtacaatccttaaggttgaagacaggagagtaacacatggcatccgatttctggctgatcgtggggctgggcaatcccggcaagaagtacgagggcacccgtcacaacatgggcttcatgaccgccgacatattggccgaacgctggtccgtcgccttttccgaccacaaggggctcgcgatgctcggcaagggcgcgatgaatctgcagggtcgcaacgtcaagttcttcctcgccaagccgctgacctacatgaacgactcgggcaacgcggtcgcttcgatcagcgcgtactatcagatccagccggatcacgtcgtcgtcatccatgacgacatggatctcgaattcggccgcataaaggtcaaggcgggcggatccgccggcgggcacaacggcatcaaatcaatcgacaaagccctgagcaccccgaagtacgcgcgcgtgcgcatgggcgtcggccacgctcagcgcggagcccacgcgcacgacaacaccgtcaactgggtgctcggcggtttcggacccgaccagcgcaagcagctgccggaattcctcgcagacggcgccgacgcggccgaaaccatcatcttcgacggactcgccgccacccaggagaagttcaatggccgctgagcagggacgcgcgcgcggcaaagcgtccgccgccacggccacacgcgtccagaacgcgctgatcgacggctccctgtgcggcatcctcgaacggctcgatgaggatccggcattccatcggctcgtcagcggcggcatgagcatcgccgacggcaaggacatcgccccgatcatcaccgtgggcaccccggacgggttgcgcccggccatcgccgcagcgcaggcggaacacacccccgtcgtcctggtcgtggcctccagccgcgaggccgaggacaccgtgaacgcgctgcggtcgtggtacggcggcgacccgaacgacatcgcacaactggaggcctgggagacgctgccccacgagcggctcagtccccgtgccgacaccgtggcgagccgcatggccgtattccgcaggctcacgcaccccagcgacaccaatccgatgttcggaccgatccgcatacttgtcatgccggtgcgttcgctgatccagcccgttgtcaaggggctcggcgacgtcgatccgctcgtcttcacgcaaggcgaggagctgcctctcgacgacgtgtcgcgccgactggttgagaacgcctacacgcgcgtcgatctggtgatggaccgtggcgagttcgcggtgcgcggcggcatcatcgacgtctttcccccaaccgcgccacatccggtgcgcatcgagttcttcggtgacgagatcgactccatccgagaattccacgcgtccgaccagcgcacctacggcgagggcgtccgcacgatctgggcgacgccctgccgtgaactgcagctcaccgacgccgtgcgggaccgggcgaaacggctcatcgggcagattccgaatgccgacgacatgctggagtccatcgcgaacgcgattcccatcgaaggcatggaatccctgatgcccgcgctcatcgacgacatggaacccgtgaccggcatgctcgacaggcatgccgtcatcatgctcgccggcccggaaaagctgcgccgcgcggcggacgacctctcgaaaaccgcgaacgagttcctcgccgccagctggcatgtcgccgcggccgggcacggtgccggagctcccatcagcttcgaccaggccagcttcctcgactacgaggagaccatcaactcgctcgcatactccagccacgacgtgtggaacctcaccagtttcggcgtggacgccagccgcccgaaccacgtgcagctcgccgccggcaacccgggcgaataccgcggtgacgaggcgaaggccgcggccggcatcgaggggctcatcgacgcagggtaccaggtcaccgtcaccgcggccgcgcagggcacgctcgcacgattgaagcgagccgtcaacgagaccggcatcgcctcgttcgacgtcatccgctcccaggccatcgacgggttcatcgacacggcggcgaagaccgcgctgctcaccgaacgcgacctgaccggacggtccagtgcggccggtcaggcgaagacccccaagcgccgccgcaaggcgatcgacctgatggagctcaaagccggagactacgtggtccatgagcagcacggcatcggccgtttcctggagatgcggcagcgcaccatcggcaccggggcgaacaagaccacgcgcgaataccttgtcatcgaatatgcgcccagcaagcgcggcgccccggccgacaagctgttcatccccaccgatcagctggatctgatcagcaaatacatcggcgcggaggcccccaagctcaacaagctcggcggctccgactgggccgcaaccaaggcgaaggcgcgcaagcacgtgcacgagatcgccgaggacctggtgaagctgtactctgccaggcagcgcaccaaggggttcgcgttcagccccgacacgccatggcagaaggagctggaggacgcgttcccgtatcaggagacgacggaccagctcaccaccatcgatgatgtcaagtccgacatggagaaaccagtgccgatggatcgcctcatctgcggcgacgtcggcttcggcaagaccgagatcgccgtgagagcagcgttcaaggccatacaggacggcaagcaggtggccgtcctcgtgccgaccacgctgcttgtgcagcagcatcatgagacgttcaccgaacggtacgagggcttcccggtcaccgttgcggccatgagccgcttccagacgaccaaggagatcaacgagaccatcgagggactggagacgggtggcgtcgatgtcgtcatcggcacccacaagctgctcaaccccaagatcaagttcaaggatctcggccttgtcatcatcgacgaggagcagcggttcggcgtcgagcacaaggagacgctcaaggcgctgcgcaccaatgtggacgtgctctcgctgtccgccacgcctatcccgcgcacgctggagatggcggtgaccggcatccgcgagatgtctacgctcgccaccccgcccgaggaccggcttcccgtgctcacctacgtgggcgcgtacgaggacgctcaggtcacggccgcggtccggcgcgaactgctgcgcggcggacaggtgttctacgtgcacaaccgcgtgcaggacatcgcgaagacggccgcgaagatccacgagctcgtccccgaggcgcgagtcggcatcgctcacggcaagatgggggagaagcagctcgacggcgtaatccgcgacttctggcatcgcgacatcgacgtgctcgtatgcacgacgatcatcgagaccggactcgacatctccaacgcgaacacgctgatcgtagaccacgccgaccggttcggcctctcccagctgcaccagctgcgcgggcgcgtcggccgtggccgcgaacgcgcgtacgcctacttcctgtacgacccgtccaagccgatgacccagcagtcgcacgaccgcctcgccaccatcgcgcagaacacggcgctcggaagcggcttcgacgtcgccatgaaggatctcgaactgcgcggcaccggcaacctgctgggcgacgaacagtccgggcacatcgagggcgtcggcttcgacctgtacgtgcgcatggtctcggaagccgtcgaacagtacaaggagccggagcggaccgagccggtcgcggtcaccatcgacctgcccatcgaagcgtccatcccggtggactacatcgattccgacaagctgcggctcgaagcataccgaaaactggccgcttcgcgcaccgatgaggacctcaaggaactcgccgacgaactcacggatcgctacggcaaactgccggaggagttcgagacgctgttcggcgtggcccgcctgcgcatgaaggcgcgggaactcggcatatcggagatcgtcgcgcagggcaagaacgtgcgcgtcggcaagatcgatccgcccgaatcgatgcagatgcgcatcaaccgcatctaccgcggggcgcaataccggccggtcacgcacacatacctgatccccgcgccgttcgcgggcacgctcggcggcaaaccgatgccgggcgatcaggtcatggactgggtgagcgacctgctgcacgacttcgcatggaagccgcaaccgaggaaggcatgatgggctcaggatccccgttcgaaggcatgtccggaggcatcggggagcggaacggcatgatccggctgccgtaccatcccctgacttcgctgatccggcatttcgacaatggccaggccctggcgctcctgcactcggggcggggcggacggtattcggtgctcggactgcacgcctaccatcggctcatgcaatacggcgatgacgtgatggaaggcaccctcgccgtctgcggagacgacgatgtctggcgggaccggctgctccccggccaagacgcgctcatgctgctgcacgaccagctgcgtgacgagcccggcgtgctcggattcatgtcatatgatgacggccgacgccgggaaggcgtgcgatcccggttcgacggcggccagcaggcggcagagcgaaagacgccgccggacgccgcatggtggagtttcgacgacatcctcatcgaagaccggcagcggcgctcgctgaccctgctcagccatcatcgccacccgaacagcgcccggaacatcgccgccatacgatccgtctgccagtccgccaccgctggcgggggctgtcgcgaagcgactgggggtggttatccagactccccgcacacctcagcctcccaccgcggcgcatggcgctgcgaccacgatcgcgcctcatactgcgaggccgtggaacgactcaaatcgcacatgcacgacggcgaagcctacgtagtgaactactcgttgcgtctcgacgtcaccagtcccgtgacgcccctggacatgttcctgcgtctgaacgacgacaatcccgcgccgttctccgcgtatgtcaacggcggcggatggcagatcgtcagctcgtcgccggaacggttcctcgaatgccgcagcggccatgtcgtcacccgccccatcaaaggaacgcggccacgtggtctcaccgtgcaggaggacgcggccaaccgcgccgcccttgagcaatccggcaaggaccatgatgagctgctcatggtcaccgacctcgaacgcaatgatctgagccgcgaggcgactcccggaaccgtgcaggtcacggggttcgccgaactggagacccacccgcacgtgttccatctggtgtccaccgtcgaggccgaattgcccgatgcccgcgatctgtccgaactgcttgccgtcatgtcgccgggcggatcgatcacgggggctcccaagcgccgcgtcatgcaactcatcgaccggtatgaacggtcgcctcgcggcgtgtacaccggctctctcggctacatcaccgccgatggcgactgcgatctgagcattctgatccgctgcgcgacgcacgtcgggcgatgtgacaaggcgggtctgtaccggatcggcgcgggcggcggcatcaccatcgaatccgacccggacgccgaatacgacgaggccatgcagaaagcacaggcgctgctcgacgcgctggactgtgacgtgtcggacagtgacgtgcatgacggaagacaaggacaatggcatgactaatagcaatggcacgcctggcggcgaaggcacggccgtcacattcgccctggatgagggataccagttcggcctcggcgtattcgagaccatcaacctgaccggcgggcgactcgtcatgctcgaccgtcatctcgaccggcttcggcgcggagcgcgggcattggatatcgacgcgccggacgatgatacgctgcgggctcatatcgccgaacatctcgacgcggcagaattgcctgacggtcggtcgttcgcggtcaagctcatggtgtcgtccgcgaacgtcatcgtcacgcatcggccgaacccgtatgcggattgggcgcaggaccgcggtctcaggcttggctggtgccgcgcctggcgcaacgagtgttcgccgctcacggcgcacaagacgctgaatcagggagacaacatactcgaatcgcgttcggctcggcggctcggcttcgatgccgccgtgtacctcaacacgcgcggcgacatctgcgagaccaccaacgcgaacctgttcttcgtgcgcgacgggcggctgtacacgccggacgagcgatgcgggctgctacccggcaccgtgcgggcgtggctgtgcgaacgatacgaggccgagcaggggaccttccgacaggattcgctggacagctgggatgaggtcttcgccaccaacgccctgatgggcgtgcgcccggtcgtcgagctgggggatgcgggctatggaatcgggccggtgacgcgggcgatccagcgcgaataccgtcggcttgagctcggtatcctctgaccgccctcagtcggctccgccgccagtcctcgacagtggcggcggagccgactgagagcggtcagatgtacggaatctgtctatatccagccgaatgttagcgctcatattatttttccgagaaattctggcactcgtccacaaaaggcattattcttaagtctgtcatcacaacctaacagtcttaaggagtagttgtggcagctattgaaagcgtttacgcgcgtcagatccttgattcccgtggcaacccgaccgttgaggtcatcctcgacaccgaagacggcgccgaaggccgcggcctggttccgtccggcgcttccaccggtgaggccgaggcttgggagcgccgcgatggcgacaagtccgtctatggcggcaagggtgttctgaacgcggtcaaggccgtgaacgaggtcatcgctccgaaggtcatcggcatggatgccaccgaccagcgcgccctcgacgacttgatgatcgagctcgacggcaccccgaacaagggcaagctgggcgccaacgccatcctcggcgtctccctggccgccctgtacgcctccgccgagtccgccgaactgccgctgtaccgctacatcggcggcaccaacggccacatcctgccggtcccgaacatgaacatcatgaacggcggcgcccacgccgacttcgccaccgacatccaggagtacatgatctccccgtacggcttcgacacctacagcgaggccctgcgcgccggcgtcgaggtctaccacaccctcaagaacgtcctgaagaaggaaggcctgaacaccggcctcggcgacgaaggcggcttcgccccgaagatgaagtccaacgaggactccctcaagtacatcatggacgccatctccgccgccggctacgagcccggcaagcagatcggcatctgcctcgacgtcgcctcctccgagttctacaacaaggagaccggcaagtaccgcttcgacggcgaagagcgcgactccgcctacatgctcgactactacgagaacctcatcaacgagtacccgatcgtctccatcgaggatccgttcaacgaggaaggctgggaagactgggccgagatcacccgtcgcctcggcgaccgcctgcagttcgtcggcgacgacctgctggtcaccaacccggcccgtctgcgcaaggccatcgacatgggtgccgcgaactccctgctggtcaagctgaaccagatcggttccgtcaccgagaccctcgacgccatcgagctggccaccgagaacggctacacctccatggtctcccaccgctccggcgagaccccggacaccaccatctccgacctcgcggtcgccaagaacacccgccagatcaagaccggtgccccggcccgtggcgagcgcgtcgccaagtacaaccgcctgctggagatcgaggaggagctcggctccaccgctcagtacgccggctacagcgccttcaaggcctgcaagaagtacatcgccaagtgattgtcgcggccgtaaggccgagacaatgctagtgtcgtgacaatgcccggcatattcgccaagtcgaatgtgccgggtatttttgttgccatgaacgactcgacccggaacatgcgaccacgcggcaaacgaagcaaacggcacggcaccggaccgatcgcgttcttcgtgtcgctgttcatcatcgcgctcggagccatccaactggtctccacgttccacacgtacgcgctgaacctcgcccagctcaacgacctcaagaatcaggaagccgcgcttatcaccaagaagcaggatctcgaaaacgacatcgaacgctggaacgatgacagctatgtggcgacgcaggcgagggagcggctcggcttcgtcttccccggtgagaaggcggtgcgcgtgcagcacccggaagcggtgacgggcacgagcaaggggaccgcgaagaccaaaagcggtacatccgacgggaaggtgctgccctggtacagcgagctcgaatattcgttcaagaaagccgatgagcggccatcgaaaacggcctccggcagccaatcgggcgataccggcaaagccgacggcaactccggcagcgcaaccgacacgaactcgggcgacaagcagtagacgcggccggcggcagcgtcattcatccgactgcataagccattcgaccagttattcgataagccattcgataaggagccaagctggtgaccgaaccagaatcacaagacgaatccaccacacgagatgtcgcgaaactcgccgaccgattcctgcagcagcgtgcagatgagcatgacatcgccatcgtcgaacggcagctcggacgatacccgcgcggcatggtggcggtcggcgcccgctgcgcatgcggccggccgctcgccgtggtcacccggcccatgctgcccggcggcataccgttccccaccacctgctatctgaccagccccgaggcggtgaaggcggtgtcgcacctcgaagcggaaggccgcatgcgggcgtacaacgagctgctgcacgacgatgagacggtggccggcgagtaccgcggggcgcaccgcctgtacgtggcgttccgccatgagctggcggtgcggctcggcgatgacgaaagccgcatcgccaacgtcagcgcggggggcatgcccgaacgcgtgaaatgcctgcatgcgctgctggcgcagaccctggtcatgggggagggcgtcaaccccatcggcgatcgtgtgctggaggcggtgacggaggagttcagtccatccgtctgccggtgcggttcgctcgacgactgagcggacagacgaaaaaccgaacggccaaaagactggaaacggccgctgaacgcaatgattgcgccgagcgagacgatcatgccgggcgaacgcccccgatgatcgcggtcgcccggccggcgagacagcgggaaacaaaggagatagagatgaaatccgttaccgttgcgggcatcgactgcggcacgaactcgatccggctgaagattgcgcgtgtggacgatcagggcatgcacgagatcgtgccgaggatcctgcgcgtgattcgcttggggcaagacgtggacaagacgcaccggttcgctcaggacgcgcttgaccgggcgtacacggccgccgcggaattcgccggggtccttgcccagcacccggtggacgcgatccgattcgtagccacatcggcgacccgcgatgccgtcaaccgagacacattcgaggatggcatcgagcagatactcggcgtgcgccccgaagtcatcccgggaacggaggaggccgatctgagcttcctcggggcgaccagcgtcgtgagccgcggcgagctcgaacccccgtatctggtggtggacctgggcggcggctccacagaacttgtgctgggcggcgacggcatcgacgcgccctccacgcaggtacaggccgcattctcgatggacattggatccgtgcgcatgaccgagcgccacctgcgccacgatcctcccagcgaaaccgaaatcgccgaagcgatcgcggacatcgacgagcacatcgacgaggcgttccgcatggtgccggcgggacgcacccgcacgatcatcggcgtgtccggcacggtgaccacgatgagcgcgctggctctggggctcaaggaatacgatcaccgacgcgtggacggcgtgcgcatccccgtggacgacgcctacgccgtggacgacaggtttctgcgcatgacgcgtgagcagcgccgcgcctacaagaccatccatccggggcgtatcgacgtggtgggcggcggtgccgtcgtatggaaccgtgtgctcgcgaaggttgcccaggcggccgcggccgatcatggcggagtcatcgactcgtatgtggccagcgaacatggcctgctcgacggcattgtgctcgactgcggacggcggttgcttgcagaacgctgaacaagcatgacataatggttctgccggcatatttgccggcacagcccccgtggcggaatcggtagacgcagcggacttaaaatccgtcgcttttggcttgtgggttcgagtcccaccgggggcaccttatcgcaacattctgggatggctgctttacatacagctgggtttgcggcccgacactgacgaaaggtgcaagatggcgaactggacgaacgtgacgcgcgagcccgagaccgggttgccgacgatgctggtgcaggcggtctccatcgcctttgtcatgtgcgtgtgcgagctggtcagcgcgccggtgatggtgagcgccgcgggaggcgcgttcgccctgatgccgtggttcctcgtcgcctgcctgttcgccgtcgcattcgtgtatacggtcggattcgtgctgctgtgggcggctgattcgttcgccgctcggctgaaacgccgcgatgcgctgatgccgctgatatatgccgtgatcggatgcgtcgggttcggcatctgggggtattgcgtgtatccggcgacgatgaactcgatcatcacccgagccggtctgcccaccctgtcgcagggcgactcgttgatgatcggcatcaactgcgccgtggtgggcctcgccgcgttcttcctgggaaccgccgccatgccgcgcgtcatgaagtccaagggcaggatcgccgtcacggccgcagccgtcatcgcgctcgccgtgttcggcggcgtcgtcctggcgatgacgtggtcgcatctggcgtgagacccgccattgcggaacgctgtcgtcgagctgacctgattcggcggttcggcggggcagcggggcagcggagatggcgacggcccggccgcgcgcatgtgcgtggcggaggatatgatatcgcgatggtatcagccgtgaaagcgtgcataacagtgtgaagggattcgtcagtcatgttcagtgttctcgacatgttcaccatcggtgtgggccccagctcgtcgcacaccgtcggcccgatgtgcgcggcgcaggcgttcgcctcgtcactggaggaatctggcgccgtgtcgcgcgtcggccgtatccgcgtcgtcctgtacgggtcactgtcgctgaccggactcggccacggcaccgaccgcgcgattctcgccggattggaaggcaacgtacccgccacagttgatacggattacctgctttcagtccgagaacgctgcgcgcacgacggaaccatccatgtcaacggcacgaacgccatcgcatacgatgacgacggcgacatggtcttcgaccggtggaagcggctcgccccgcatcccaatgggatgcggttccaggcgttcgacgcccaaggcaacatcatcgacgagcaggtctggtattcgataggcggagggttcatccgccgcggacggatcgacgacgcgctgatctcgaaccacgagcagacgccggcgtcgtcgcagtcgccggaggactccgggaacgacgaggctgccgaatacggcgacggcgtgccatatcccttcgtatcatgcgacggcctgatcgacctgtgtcggaagcaccatctgagcatcgccgacgtcgtctgggcgaacgaaacggcccggcgctcgccgcaggaggtgcgtgaccggctcacgcgaatctggaacgtgatgagccactgtatcgacgccgggtgcgccagcgcgacgccgacgctgccgggaggtctggacgtgccccgccgcgccccgatgatgtaccggcgtctcgcggccaacagcgacgtgctcagacgcgaccgccgcatctcttcggcgctggaatcctccgattccgcatgggtggcgttgttcgccatgtcggtgagcgaggagaacgccggcggcggccgggtcgtcaccgcgcctaccaacggttcggccggcatcattccggccgtgctggaatactactggcactttgtcgagtccgccgacgacgagggcgtcaggacgttcctgctgaccgccggcgcggtcggatacctgttcaagcgcaacgcctcgatctccggagcggaagtgggatgccaaggtgaggtcggcgtcgcctgctcgatggcggccgccggtctggccgcagtgatgggcggcactccggagcaggtggagaacgcggcggagatcggcatcgagcacaatctcggcctcacctgcgatccggtgggcgggctggtgcagattccgtgcatcgagcgcaacgcgatggccgcgaacaccgcgatcaacgctgtgcgcatggccatgctcggagacggctcccacatcgtcagcctggatcaggccatcgccacgatgaagcagaccggcgaggacatgatgtcgaaatacaaggagacctcgaagggcggtctggcggtcaacgtcgtcgaatgctaggccgtcgccgtgccgaatatggcgaatatggcgatttgcgttgaaaaatacgctgcgagctgtgcaaccggggcttggggtgctagtgtgagtggcactgtctttttacgacttgcggccatgccatgaacggcatggcattattgataggaggtaggccatggcgaacatgcctgaggtcaatgccgtgtttggcgcggctccggagatcgctttcccgtcggacgaggcgccgaagggattgaaggccgtggagatcgtcgagggtgacgggccgatggtccgccgcggcgacacggtgaccgtgaactatcacggtgtggtctggggcaaggacacgcccttcgattcgagcttcgcccgccaccagccggcaagcttcggcatcggcgtcggtcaggtgattcgcggctgggatcagaccgttcccggccacaacgtcggctcccgtctggtcgtgtcgattccgccggagtatggctatggcagccagggcatgccggcggccggcatcggcggcggcgacacactcgtattcgtcatcgacatcatctcgacccgctgaccgtatgatggcggtcatctgacgcatcgattggatatcactgatacaggaggaacccatgggtgaggaaaaatccgttctgctgacgcaggaggctttcgacacgctgaaggatgagctggcgcatcgacagggccagtaccgcgaggaaatcaccaagcgcatcgcggcagcccgcgccgagggcgatttgtcggagaacggcggttaccaggccgcgcgcgaggagcaggcgaagaacgagggccgcatcaacgagctcaccgtcaagctgcgcaacgccaccatcgtcgaagctcccaaggccggcaaggtcggcaacgggtcgctggtgacgctggagctcgccggccgcgagatgacgtatgcgctgggctcgcgcgacatcaaggtcgcgacgaagtacgacgtgatcagccccgagtctcccatcggcgccgccattctgggcgccaacgagggagatacggtgagctacaaggcccccaacggccgtgagatttccgtcgtcatcaaggaagcgaagcctctgagctgaccatatgcgcgtccccgctgaccggggactggtgattgtgtgcgccatcagggtcgacatgactcacttcgggctgtacggttttatgccgtgcagccctttccaatataaactacgttgtcagagccgtctcacttgactatcattgaaccataggttgttgtgttggcctatataccgcagacgccaattcaatggagaagacatgaatgggaaaatgctctctgccgtcggcaaccgttataagtacgttgtcgccgagcttcctcccatctcaggcaatggctgcctcctgtcttacgcgcggtatgggatgtgtgtgcctaaaactccatacagtgcgaatttctgacatagcttatgtgaggagttgtttctgataagacgttcaacgaagatttcaatcggcgttacgacggtggttatcgtagttgctgctgtcgtttgatgatggtacgtacacgcccatcaatcccgccagcggcatgctcggagtcggtggacagcaggtcgctgctctctcatccgacggacgatccgccactggcgccacgcttcaggcctatgccgaggctgtggactagaaaagcgtttctaagtgcgcgccgaaacgatgagcgtgcgcacataggcacgcaaatggcccggtttgcgttcttaagtgcgcacggttgtcgtttcggcgcgcacttaggaacgctctagtgcgttgtatagcggtctcgattttgtttcgaccatcacgtgttacgacgagtgaaggcgatgttcgttgtgggctggtggccttcttcagactcgcttcgcgagctggaccgaggacgtccgcaccacgaccggcaaccgcagtttcatggaagagctggccgagtgctcttggaatatgtaagcgtcttcgtgaaagcggaatggtctagggcgtcaattccgcctagagatctccgcccaatctcgtctctttatcggaacagcaaacacggtccacgattgacatgggcgttgacgctgattcatgaggggagtattctggatattacgacagacagttgtctggtaatgtccaaaggaggactgtatgaatatcaaaaacaaaaataaaggcgatatcgattgccagtatgttggcgctgtctccgttggggatggcgcctgcacatgagacaaccgtcagcgtcgcagacgatgccgcagcaaccacagtagaaccgcggtatggcgagaaaacgacaatgacgttgatatccaccgcgaaaaaaccggcgttaccggttattgcctgcagccgcctagtgctgctcattactatcaggcacgcatcaccaagaattacaccatcaaacattatcgtgttgactactacgagtacggagtcaagaagcgaactttttatcaggacatgtatgagcaggtatctgaagctccatatcttgtctgcgtctcataagttcgcatatcgaagggaatcatcgtgaacacgacgcgtaataaactgctgaactggtatccgatcatggcggtgctggtgctgattgtattcgtgggcggagcctggctctgggcgtaccgcacgactccaagcgcctccgcaatcaccggcgagctcaacgcgattcctgtcaatgtgaccagcgaacagctgatccgtgacggatacattgatctcaccaaagtaggagaatcctccaacgtcgcggtgaatgagtttcttgccgaagcgaaacagcaggaagcccccgtactgaaatacatcaacatggagaaggggagcctcacggctcacgtcctgtggtataacccatatgattcgaccccttgggccaaagccaaggatggttcggtcgtgatctaccacaaccagaccgggcgaatccgcgcatgggcgtggcgcaacggtgagattgtccaaaacggtgaacgctacagctccaaagcggtgacggtcacgaaggacggagtcgacaccatgcttctgccgtggcggccggctgcgcccgatgtggtcccggaagatgacgacggggcatcatcgttggcgctgtattcgtatcgttcgtgattgcatagcagcattccaccggttctgcgggggcatgggcgcatgtctttgtcgtgcatgcccccgcgcggccattccaggatggcgtcgtgatgacgtcttatctggtgtccatggtcggggcatcacctgatgtgcggtgcgccgtcggtgccgcgctccaggtctatgctgaggctgtggactagaaaagcgtttctaagtgcgcgccgaaacgatgagtgcgcgcacataggcacgcaaatggcccggtttgcgttcttaagtgcgcaggattgtcgtttcggcgcgcacttaggaacgctttcatgtgttacttggcggtttgcgggggaggggagtctgattattgcggattatagcgggtgatgatggtcgctgtagcctggtaaccaccctcagtctcgctttgcgcgccagctcccgccagcgggagcataagttgtgtggtgctcgctggcgggctgacctgagcggcgatggtcacggccagagatgcacgatcaccatgtagatcgcgaccatgtggcaggcgtagccggcgacggtgccacagtggaagatctcatggaatccgaagacgcgtggccacgggtcaggcttgcgcagcgcgtagacgatggcgccgaggatgtagcaggcgcctcccgaggccagcagcaccacgacggcagggccggcggcgggggagacccagaagaagtacatgaacgccacgccggagactccgaacacgatgtagacgacggtatacagccagcgcggggcgctgatccagatcacatggatgatgagcgccaccagcgtgcagctccatatgccggcgatgatggcgttgcgcatatgcggggcgagcgcgaacgacaccggcgtatatgtgcccgcgatgagcaggaagatgttcacgtggtcgatgcgccgcagcacgtcggtcacgcggggcgaccagtcgccgaggtggtaggcggctgagttgccaaacaggatcagcgagcaggtcatgaacaccgcgcaagcccatttcaggggcgcgccgtgggccaggcatatcaggacgatgcctgcggcgagcgacagcggcgtggcgattgcgtgaatccaccctctcatcaatggcttgggtcgtccgtgcacgtcgagacggatcttgcgctccacttccgccggggcgattccctcgatgcgtgcggcgtgggcctcgcccttggcgagggtcctggtggctttttcctcggccttatgtcggatcgcctcggccttcgcgcgggatttcgctctcaccgcgtcggccttcgcctgcaatgcgacttcccgcgccttgatgacagcggctcgcttcgctgccaccgtcgcgtcgtcctgtactgccatatgacctccccgattggttacggaaacgtaacttacgttagcgtaggttatagacttgtccgctcacggatgtgctcatgaagtacggatgacgattgcgtcatgcatcggcatggtattgcgtatcatggtactcatggctgatttcacacacattctggctactcgacctgacttcaccgaaagcgatcgcgaatggctgcaccatctggtcgccgactggcaggtgatcgccgatctgagcttcgccgacctgctgctgatcgtgcaggacggcgacggcaactaccgcatcgtcgagcagtgcaggccctccaccgtgatgaccctgagaatcgatgacgccgtcggcgcgctggtcgccccggaaatggtgggggagctggatgccgccatgcagtcgaagaccgtgttcaggtccactgtgctcagggcggtcggcaaatccacggtctgcaacgtgtacgcccccgtccgtcatgacggcaagacgctggggcttgtcgtgcgtgagaccaacatggccacgcgcgagtcgaacggccggtacgagtccgaaagcatcaacgcgggcaagcagttgtatgagatgattccccgtggccagttcccctacgtcaacgcgatcatgagccagcgccatgtcgcgcgtgtctcggacggcttcatcatgctcacgcaggagggcatcgtacgctacgcctcgcccaacgccatcagctgcttcagaaggctgggatgcctgatgacgatgcaggggcatttcctcagtgaaatcggcaccgacctgctgcgtcgcaacgatccagtccccgaggcgctgccgatggtgctgatgggcaaggatgcagtggattccgaaatcaacgccaaccgatccgcggtatccgtccggtcgctgcccctgtacgacaacaacgggcgcaccggggcgatcatcctgtgccgtgacgtcaccgagctgcgcaggcgtgaggtcgaactgcaaaccaagaacgccacgatctcggagatccaccatcgtgtcaagaacaacctgcaggcggtctctgcgctgctcaggctccaggcgcgcaagacgaagtccagtgaggtcaaaaaagagcttgaagaggcacagcgccgcgtgcagaccatcgccatggtgcacgagggactgagccagaccgccgatgagatcgtcgatttcgacaaggtcatctccaacctgctgaagatgagcgtcgacttggccacgatgtgcgaccagcacatccacatcgattacgtcggcaagttcggcatgatgcccgcacaggacgcgaccccactgtcactggtgctcaccgagctcatcaccaactgtgtggagcatggtttcgagggacgcaaggaggggcatatcaccatctccgccgggcgcagcggcaacagcctcaatgtcgtggtggaggatgacgggtcggggctcgccaacgaggaacacgacggtctggcacgctcctcgggctccggattgggcacacagatcatcaacacgttcgtcaccaacgatttcggcggcagcgtgcgctgggagccgcgtcacgaaggcggcacccgggtcatcctcgacatgacgctgcgtgcggcgcagaacgagtgacggccgcttgacggcccgaaaacctgccgaaacatgattgaagggtggcctccctgtgggggagaccacccttttcgtagcatatggagctatgaatcggctgcggcgaggagtcggttgtgacgaggagcgactcagacctgcagctgcatggcctgggagcgacgcgctcgcatcgcgcgacgcttcagggcgcggcgttcgtcttcgctcagaccgccccagacaccataatcctgattggtgtccaacgcgcacttcagacaggcgtcaatcaccttgcaggtgcggcagaccgccttagcttcctcgatctgctggtatgcggctcccgtgtttcccaccgggaaaaacagttccgggtccttgtctcgacatgctgccttggcacgccaatcaaaagcgctgctcatgtgtatcaccctcctcccatcgcctattgccgacgacgagctttcaagtcatacattaggtaaccacgaaacgaatgttttttcaagaggttttcgctctcaagtgtgaagaacttcagattttggccatggcgcactgtatccacagggcgttcccttcgcgcagcagcacggcgcggcccgccgtcatgatgtcatccggcccgcattgcgacagcaggccggcgggtatgccatccatcaggtccacggtacgttcccccgtggggaagactattctcgtgccgcaatgctcggggatgcggatgtgcttggaggtctccacggcgaacacgacggtgacgtcgtggtcgcccagcgcgtccttgagccgtgcgcatagcgggtccgtgccgaacggatcgaacagtgtgtcggcatcgtccaccagccacagcagatgcggggatacgggaggtggcgattcggaggagaaccgcacccgtctgtgatggcgtaccgtcgacgtgacgaacgcccgtccctcgcggcgtgtccagcgcacgcacaggccgagaatgtcgcgtgaacggtgcgctagcaaggcgagaatcgtggacttgccgcgtcctgcgcttccgatgattccgacattgccggcgtttacggcgagttccgccacatcgatgccgatgccgtcatcggcaagggcgaagggcactgagggaacgtccgatgaccgtgcgggcagcatgtcggcctccacgatgcggggcagcggggccgtgaacagcgccgaggcatggaccagaccatggaatgccgcagctgtgcgcgcggcctcgaccatagcgccgatgtccgatacaaaggcgcatcggaacggctccacggattcaccgtcgttgcgccatgcgcacccgggagcggacgggctgatggatgccgcccgcccgtctcccagcaattcgatggattgcaggccgtcccggacacgcaggcatatgttcagcgccatgttcgctttcatgtcggcgctgacctgtcccagcgggttctgcgtacaggcgatgacatgcatgcccagggagcgccccagcgaggcgatgcgcaccagccggtccacatagtcgggcagctggttgttcagcgcatggaactcgtcgatgacgacgatcagcgagggtggtggggattgcaactgcccgattgagccgacacgctccgcggcgaccagatgctccctgcgtcgcagctccagctccagcgccctcaacgcgcgaacggcgtgattcagatcgaggtcgcacacgctgcccacggtatgcggcagccgctcgatgacgctgaacgccgaacctcccttgaaatctaggaacacgaaatgcagccggtcgggcggattgcgcaccgccatggccaggcaccagctttgcaacagcacggatttgccggagcccgtggtgccggcgaccaaggcgtgcggcccttggcggggcagatcgatcgtgaacggccgctgccccgaccccatgcccacggtgacgcacagcgacggggaggcgagccatgttctcgcgatgatgcgccatggcagcggctcggcctgaagccccgtcagctcctccagtgagggcgagtgaatccgtgacggatcctccgagtcgccttcatccttgtcccgatcggctccgtccgccgatccatgatggcggccccgggctcctgccatatcggtgggccgatttgggcggccgcccgcagcgtcgtggctcgtcgtcccggattcgtcgcggcgtgacgatccacgacggtcggcaagggatgacgccgccgaagccatgcatcccaccatgcccggcgcgaccatggcggcgaacagccaacgtcgctccagcagcagcatgatgaccatcaacgcctgtgcggcgatgggcgcgaccagcgtgatcatcggcagggcggacgatccgcgcgcgcgtcgctcgcgcctgggacgccgcctgcctcggccgcgccgcccgcgcctcgaatccgggttcctgccttcgtccatgccctcagtgtggaacggcgtcgccggcatgcgcaagcttgggggaacaatgtggtcgaaggctaccgagttatccacatttcggcgtgtcgtggccggcgggtggaacacgccaaccggccacgacgaggcatgcggcctgccgcatcattctgcgatcactggttggccagcgtgcccacggcgcccggcttgtggctgcccgaagcgagctctctgaacagttcgaggtttttcgcgtcatccagcagcaccgacgagccgaccccggacacgttgtagccgggattcgtccaatagacactgccgctgatgccgttgtcggaggtggcgtcgcggaacgcgaacaccatctgtgcgagcgtgtacgggttcgtcttggaatcgacggtgatggacgccaaagcggctttcagcgtcttgttgagtttcgggatgttggtcagcgtcttgccggacatggccttcttcgcgatggctccgatgacctgccgctggcgttcggcgcggccgaaatcgcccttcgggtcggagtagcgcatgcgcgagaacgccagggaggtcgccccatcggccgtgtggcatcccgcggtccagttgagattggacagggcgtcgttcacggtctggtcatagcacaggtcgaccccgcccaacgcgtcgaccacatccttcaatccgttgaacttgatctgcgcgacgtggtcgatcttctggccggtgatggtctcgacctgctggacgagcgccttctcgccggacagctgggcgacggcgttgatcttcatataggtgccgttcacctgcaccagcgaatcgcgcgggatggagatgagcgagcgggtgccggaattgggcttggtcagcacgaggatcgtgtcggtgcggaacccggtgatcgtcttcgcctcttcgccggtgcgctggtcggatccgaggatgagccagctggtgcctgacgtgttggccttgtcggacagccagggctgcttgtcgagatgaccgtcgacccagttccacagtccgaacgtcaccagcatgatgacgaccaggagcgccgccaaaacacttgcgacgatacgtcccacggggcgctttctgcgcatggcggtggctgccggcctcccggacatgccacggccgcctccctgtgcggccggcatgccgtaaccgtcagggctctgcgggccctgacgttgtgcggaggcgaacatcgactgcgcacccgcgccctcgcccggacgaggctggttcgaaatagtatgcgtggagcccgctgcacggcggggctggcgtcgggccgcagaagcggcgtcctgcatgggagagaccggttgcaggcgggcgtcctgctcggatgcggaccgcctggtcgacccggatacgcgacgcgatgaattcggcgtgaaactgggaatcacgtcctgtgcggccggcatgctttgcgctccctgagcgcctgccgaggtctgccgacgcgacggcacgcctgcctgcggaccggctccgggcacggccttgccggcggctgacggacgcggcacctgcccgctggggcgacgcttgcgcgtgccggagggaatgaagctgggaggattgtcctgtgggctgactccactgtttccttcgctcatggttcctccagtgcctcgtgttctcaatcccttttacacgttgtcatgagtcattgtcgtgtccgttgcccattcctctgcagtaacggcacatacgtgaagggctggtggtcggatatgacagggaatgaggaaggcatgggggtgaaggttgatgtcgcttaccacactttcgctcttctgcgctgcattgacacggggtagacttgacaaaggtaagtcgcatgtgtgtaattaccctgatggacgtccatagcagcatcggcaaggaggagcgacacatgtggggagtggtcgacgattccgccgaggatccgatgagtgagctgtggggcctgttcaagtcggacgacgatgtttcctggcagcataaggccctgtgctcccagaccgatccggaagcttttttccccgaaaaaggcgggtcgacgcgtgatgcgaaacaggtgtgcgcccgctgcgaggtgcgcgagcaatgcctgcaatgggccatcgagcacgatgagcgtttcggcatctggggcggtctgagcgaacgcgaacgccgccgctataagaaggaacacaaggaacgtgcgtgacgcggcggccgtgcgtcgcatagactggagattatgagttccacaggcaatagcgatattcagcggattctggccgatgtcatggcgaacaggccatattcgcatcggcaggatgtcgatccgaccgtcgtggcggtggtgaccgttgaagaggacatgcggtttctccccgacaccatgggggcgctgctcagacagacggtgctgccgggcgtgatcgtcatcgccgattgcgccggcggcgacaatcctccggtgcaatcgcagttccaggtcattcctgcgccgtcgggactggtcagctccgttccgcagcccaagaccgtcacggtcgagctggtcggcgtcaagggcgcccgttcgttctatcacggcgttgccaaggcgctgcatgacgcgcaactcgactcgtccacccgcgcggtctggctgttgcatgacgattcacggcccgcggacgacacatgcctcgaatcattgctggagacgtggcgtaacgatccgactgcatcggtgctgggagccaagcagctggactggcaggccgaacacctgcatgacgtcggcgcgtatgcgtaccggcatcgtgtggagtcgctggtggtcgacggcgaaccggatcaggagcagtatgacggccgccgtgacgtgttctcggtgagcctcgcgggcgcgctcgtctcgatcgagaccatgcacgagcttggcggtgccgacgactggttcaccacattcgccgaatcggaggatttctgccggcgcgtatgcctgagcggccggcgcgtcgtggtggtgccccaggcgcgtatcgcccatcggcgggcgcgattcgaaggggtgcgcaccaagggcggcgagcccgtggacgaggatcgtcccattgacagttcgatggctcgcatcagggggaggatgcgctactcctatacggacacgcgcctgatgatgtggccgttcgtctgggtgttcggcgtgttcgccgcgattggcaaggcgatcgcgaaactgttcgccaagcgtccgtacgaggcgctgtgcgaactggtagccccttggacgctgtggggtggcctgcctcgcgccatcgcggcccgtcgccgcgtcagccgccaggagtcggtgccgatcgggcgtctcggcgtcctcgtcgccaaccggcagcaggtggcgcaatggcatgaccgcgtacaggcgctgtcggaccagcgccatgtcgtcctgctgtcgccgctggccaaggcccacttgcgccggcgtgcgattcagcgctggctgctcgcggtggtgatggccttggtatgcttcggcgtcgtggcggtgatgcacggcaccacattgcgtgccgttctgtcgggagcgtccctgtactccgattcgctgctgccgaccggcggggacttcggtcagctgtggcgagccgccaccacgtcgtgggtgttcggtgacggcatcgccgccccgccagcgccgtggctgctggtatggggactggcctcggtgataacggccggcaatgtgtctgccgcgatcgcgttggtgacgtttgccgcggcgcccctcatggcgttgtccttctgggcgttcgccggcgtgttcacccgttccgatgcggtccgtgtcgcatgtggcctgctgtgggcgtcgttcgcgctcggcctggggctgttctccgcaggcgatgtgccgatgctcaccgtgatggtgttcctgccggccgcgttcgccttcgtgttccgcgcggtgggtctgtatcgcaccgaggaccaggtgacggcccatccttccgttcaggctgcggctcttgcggcgttgtgcttcgtacccccggtcgccgccgagccccagctgatgctgtccctgatcgtggtgttcgtcgtgttcctcgccgtggtgccgcggcatcgcgcgatgctgctgctgattccgctgccgtcagggttcgtgatcgcgccgaccatcatcaacgcggtgcaccatgcttcggaagggtcgtggcgtcagctgttcggtgatgtgatggtgccgttatccgccaggaacggcgctccggatgcttccgggttcgccacgctggccatgcgtgcgttcggtgtcgatgatacggccggcaacggtctggcagacctgtcggcggccggcgttttcggtatcggcgtcctggtgctgctggccgtggtgacggtgcttgcggtggcgtcgctgttcctgcccttcgcattgcgcgcctcgcgcatgatgtgggtcgtcacgctcagtggtggggcgcttgccgtcgcatcgtcgaggatcgtcgtggccgtcgatgatgacggtcctgtcgcgggttccgtgctgcccggcgtggtgttcgcgttgcttggtctgctcgcctgcgtcggattggtctccggaatggcggtccaccggttctccttgttgcggcaggggaatggctcgcaacccgtgctgacacgtcttgaaggccgtaaggccaaaaacgccaaggtgcatgcggtgttcgcccgtatcgggcgcggcgtgctggtggccgtgctggtggccggtgccgtgtcatgcactgcggcgtcagccatggaaccggggtcgaacggtctgcacgcgtcccgttccgatgacgggctgcccatggtcgccaccgattatctcggcaaggacgacgcgcaccgcgtgctcgccatcaccgccgaatcatccaccggcgtacggtatacgacgatgcgcacgtcacgcggcgatctgatggacagctctccggcattgcgtgcccgagtcgcggatggcggtcatgactcccgcgacgccgtactgtcgtccgcgagcgcccgactgctggtcagcgccgatgccgacgcgatcgccgatatcagcgcgttgggttacggcggcctgtatgtggtccgcccatcggctgacgatggcggctcccaggccacggaacagttgatttcgaacatcacggcgagtgagggtatccaatccgtggtgagtaacacgtcgggtgtctattaccggctcacgctcgtcgacagcgcgacgcagcgcgtgccgcaggacggtatgctgaaacagcggcatcttgcctaccggtatgcatggctcgtgtgcatgggcgtggtgatggggctgtattgtgtcgtcgcgttcccgcgcagccaccgtcgtttcatcgaggaggaccaatgagcagccaagtcaaacgcggaggcaaggtctggaaggctgtggtcggcgtcatttccacggtgatcatcgtcggcctgttcgtcgccctgctggtactgacggcatcgggccgttgggtcgactccgtctcgtcggattcggcgtccgtctcgcacgcggtgagccagaggcggatcaccgcatactgcccgtcccgcatgacattgccggatgcgtcggcgtacggtgacagcgaatatcagccgagtgaaggcgacatctcgtcttcggccggattcgccgcgttcggagcggtgtaccggtctcagttcggcgcgtttggcggctccggcgataccacgcagctcaaggacctcgaccctacggataccgcgaaagtcatcgcagcctcggccgacgtcgaccgtacgtcgctgctgttcgacacgcagctgttggaatcggccgcgggcgtcggcgcttccgcgtccgtggcgtcctgggcgacgaagggcgacctgcgcggcctgtccgcgacattctgcgatgtcggtgcgctggagcagtcgttcgtgctgcctgacacgcagaccggcaccacccagcagctggtcgtggccaattcgtcttcgaaggccactgtggtggatgttcgggtgtggggtacggaacagtccggtgcgctggcgttgtccacgggaagcacgctgaccgtcgcggcgaacgccgaatccgtgctgagtctttccgcggccgcaagcgggcagaaggggctgtatgtcacggtttcgagccggcagacgccggtatcggcatcggtgcgcgtgatcaggaccgaagggctgaacccaaagggatcggattacgccgccgcggccggggaggcgtccaaggagctcgtcttcccggccgtcgcggagggagacaaggcgacactcaccgtatacgcggccggttcggggtcgctcaccgccgcatgggtcggcgcggccgggcagtccgtccatcagtattcgggcgaccgcgtcaccaccatcgatctgggcgatgttcccaaagacgcgtcggcgctgaagatcacggcggatacgaaggtgacggcagatgtgaccgtcagccgtgacgggaacgggaaccagtccgatttcgcgctgatcggcgccgcgcagacagacgaccggtcggccgccgtcattccctccggtcttgacggccgtgtgagcgtggtgaacgcgtctttatccagcaaacagatgcacatgaccggttacgacgacaagggtgccgcggtgggggagaagaccatcacggtggacgccggtgccgcggcgagcttcgacgcgtcggatttgggaaagaacgtcttcgcggtggccgccgacggcaagggactggcatggggtgtccggttgtccagctccgcggtgagtgacgccaagctcgccggcatcgcctacatcggtgccacgccgttgatgccgctgcaggagaggatctgggcgcggtcggatatgaccatcgttcactgacggtcggtcggcggaacgttccgtggtgccccctatgaggggtgctctatgaggtttcgccccgacagagccttacaggctccaatccgggtcgatctcatccggccggcggccatagagctcggcgagccgaagcaccacctcatcgcggatggccagttccagatccatgcggctgcgtgatttgctctgtatcggcatgcggtacagcacgatgcgggcggggatgccgtggctcgcagggaagcactgggacgcgaacgacggctccggctcccaaggagccggctgcgagggcggcacatcctccacggcgaactgcaccggcttgaccagttgcggccaggcaccgttcagacgccggatctgggccgcgaccatgtcgtcgaacgcgccgctgcgggtgcggtagcgcgggagccgcgtgccgaacatcggcgtgcgcatgccccgcccgtgacgattgcgatacgttggtcgttcccatggtgcctgttgcatggactccactgtaggacaagccggcggcaatgcgttaggatacttatcatcgacaaggtttcctggggaggtgtacagatgccaacagcgaccgtgcacgcttggaatgataccggttggcgacacgacggcgcacatgcgcgtctgatcgccttcgacctggacaacacgctggccgtctccaaacaaccgatgaaaccggatatgaccgttcgcatcgaggcgctgaccgaactgatgccggtggcgattgtgaccggcggcgggcgtgaactggtcatcagtcaggtgctcgacgtgctgggtccccgagctgacctttccaacctgcatgtgatgccggcggggggatcgagctattaccgctggcgcgagggcgcatggcgtctggaatacgagaggacgctgtcggcccgggacagggacgcggccatattgtcgctgactcgacgcgcccgagagctgggcatgtggccggagcacccgtggggggagtccatcgaggatcgtggcagccagatcacgttctcggctctggggcagctcgcgccgatcgaggagaagcgccgctgggatcccgacgacaccaaaaagcggcggctcgtcgccgcggtggcgggcgacctcggtcatctgcgcgtacgcgcgggcggctacacgagtgtcgatgtgagcgccggaaacaccgacaaggcgttcgccctgcgcgaattggcgggacggctcggcatcggcatcggtgacatcatcttcgtgggcgaccggatgacgcccggcggcaacgactatcctgccgcgcaggcgggggctatcgcgcttcaggtcaccggaccgcaggataccgtgcgtctgtgcgacatcctgctgcctttgctgggtggcgagccggttcggcaggacggatgaaccatgggatggcacggtttcgcgcgaatgctcacagaagtggccggatcgctgcgggacgtgctgcttccgcgtggctgtgcgggatgcgacatgccggacgctgtgctgtgcgatgactgtcgtgcttcgggtggcggcttcatgtcgttcgctatgcctggcacggtttcgggccgggcgattgcctgcggcgcatatcgcgggccgctgcgccgtgcgatactgcgatggaaggatcatggcgacgaggaatgcgatggcccgttcgccgatatgatggccgacgcgctgctttcgtcgggcctgctggcttcggatccgatgccggtgacgacattggtgccggccccatcctccccgcgttcgatgagggagcgcggacggtggcatatgcgtaacgtgacgaactcattggcacggtcgctgcggcggcgtggcatggacgtcgatacggccgcgctgctgcggacgacgaagacgagcggcaaatccgtgcagatgcacggcgccgcccagcgttcgcggcgtctgcaggggcatatcgtcatcgctgcgcgcccaccctacccacgcaacgtgatcctggtggacgacatcgtcaccacgggcaccacggcccggcaatgcgcgcaggcgctcaacgccgcgggaatacatgtgacaacggtcatctgcctggcgcgcaccctgcgcgccggcgaaaacacagacgactagccaagtcccctcccgctggcgggaggggacgcgcagcgccggagggtggtcgccacccggtcgagccgcacacccgccatccgcgcagatcaccagcgcaatccagttatttccgtcgcagccgacgctgtggatgaaaactgcccgtgaccacgccccatatcacgacatccccatgttcggaggggacgaaatcggggtagcggggattctccgcgtgcagcatggggcggccgtcgcgcgacagcagtcgcttgaccgtcagctccccatcgagcacggccaccaccacatcgccgtcctcgggcgtcagcgaactgtccacgaccagccaatcgccgtgaaaaatgccggccccctccatggagtcgccggcgacggtggcgatgaatgtgtattccgggtgcttgatcacatgagcgtcaaggctgaagccctcctcccgcccgtccaaggcgggggaggggaagccggccgctaccatctcggtgacgatcggcacgggacggtgatccggtcgcgcatgaaccaccgaacgtgccgtgcaggcttcgggagcggaatcccggctcacaacagggcccgcgccgaaccgtcggtcgccggctcgtcatcggcgatatggtatttcggcagcacgatctcgaaatccgcgccgcgcgggtcgtcgaccacccggaccgtgccgccgtgcagctgtgcggcccaacgcgcgatcgacaatccgatgccggtgccgcccgattcggtgccggggccgctgcgccccttgacgaaccggcggaagatgtcggaacgttcctcgacgggaatctgagacccgaaattcaccacattcgtgacgattgtgccggtgtcggcattctcccgagcctcgatcagcacgctggtgccgtccgcggaatgcttgagcgcgttcgcgatgatattggtgaacagctggcgcagccgatcctgatcaccctccatccagatatcggaatccacgtgcagcatgatgtcgtgcgcgtgcccggcgtccgcgatctccagcggctcgatcgtctcgtcgaggaaatcatgcaggcagaaacgttcgatgttcaggctcgccgcgcccgcctccatgcgagacagatcgagcaggaacgctatcaggtcggatagccggtgcgtctggcccagaatgccctcaagattggccggcgtgggctcgaccaccccgtccgccatgttctccaccatcgcctgcagcgcggagacgggggtgcgcagctcgtggctcacgttcgccaccacatcgcgcctcatctgatcggcgtgctgcagttcctcggccatttcgttgaacgtgcgggccaactggccgatctcgtcgttgctgttggtcgccacgtggacacggacgctgtaatcgccctccgacatcgcctcggccgcgtcacgcagctgcctcagcggcgcgatcagaccccgtgagaagaaataggtgatgcccagtgcgacgatcatggtcagcggcatggcgatccagccgctccacccgtacttgagcaggaaccagaccagcacgaacgcgatggacgtggcgatgacgatcaggacgctcaattccattttcagggacgaaaacagcccgatcggacgatcgaaatccaatcgggcctgtttcctgtcccgcttctgacgcggcttcatcactgttccggcggctcgaaagcgtagccgacgccgtgcacggttcggatggtctcggaaccgagcttgtgacgcagcgccttgacatgggagtcgacggtgcgggtgccggatgcatccacccagtcccagacctcttcgagcagcttctcgcgggtgagcaccgacttgggtttgcgcgcgagcgtgaccagcaggtcgaactcggtcggcgtcaggtgcacctgctcgccgttgaccgtgaccagacgctgtgccgggtcgatgaccagcgagccgaagttgaggatcttctcgttctcggagttcttcgcgatgaccttcgcgcgttccacgcggcgcagcagcgccttgcagcgggcgatcagctcgcgcatggagaacggcttggtcatgtaatcatcggcgcccgcgccgaggccgatgaccttgtccgcctcggcgtcgcgggcggtcaggatgagcaccggcaccgggcggtcggccacgatgcgcttggttgcttcaagaccatccatgaccggcagcatgatgtccatgattaccaggtccgggcgcagctgcttggcggcctgaaccgcgctggcgccgtcggacgccacgcgggcggaccatccctccgcggtgatgcgctgagcgatggcggtggcgagggtcggctcatcctcgaccaccagaatggtccgcggcgtcgtttgacgtgttggagaattaatcatgacgattcacctttcagttttccggtttcaagaataccgcccccaatgccggaatggtgagttttgccgaccaatcacgcgaatggtactcgcccttcactgcggcgaacgtgccgttgtggatgtcggagccgccgtacttcttgtcgtccgtggtcagcacctcggtccagttgccgccctgcggcagcggaacctgatagtcctgccacgcctcgccggagaagttgaccacgacgacgagctgttcgcccttgctgccgatgcgcaggaagctgagcgtattgtgatcggcgtcatcgctggtcagccactggaatcccgccgggtcgaagtcctggctccagatggccggcgtatccttgtagaactcgttcaggtcggcgacgagcttctgcacgccgcggtggtcaggccagttgagggcgtcccagtcgaccgaaccgtcatgattccactcgccgtactgcgcgatctcgttgcccatgaaggtgaggttcttgcccgggtgcgcccactggtaggcgaacagggcgcgcacgccggcgtagcgctgccagtcgtcgcccggcatcttgccgaacagcgagcccttgccgtacacgacctcgtcgtggctgatcggcagcacgtaatgctccgaataggcgtacaccatcgagaaggtgatctcgttgtggtgccatttgcggttgatgggggtctcgtgcaggtactgcagcgtgtcgtgcatccagcccatgttccacttgaggccgaatcccagtccgccggcgtcggtcggtgcggtgatgccggggtaggcggtggattcctcggcgatcatcatgacgccggggttgttcttgtacgcggtggcgttggcttccttgaggaagtcgatggcttcgaggttttcgcgacctccgtagatgttcgggcgccactggccgggcttgcggctgtagtccaggtacagcatcgaggacaccgcgtccacgcgcagcgcgtcgatgtggtattcgtcgagccagaagcaggcgttggcgaccaggaagttgcgcacctcgcgcctgccgaagttgaacacgtacgtgccccagtcggggtgctcgccgcgcagcgggtcgggatcctcgtacagcggggtgccgtcgaagcgtccgagcgcgaaatcgtccttcgggaagtgagcgggcacccagtccatgatgacgccgatgccggcacggtggaacttgtccaccaggtacttgaagtcgtccggattgccgagtcgggagtccacggcgtagtagccggtcacctgatatccccacgagcccgagaacgggtgctcggtcagcggcatgaactcgacatgcgtgaagccttccttggccacgtagtccacgagctcgtccgccagctcgcggtagttgccgatgcccttcttccagctgccggcatggacctcgtagatgctgaccgggccggcgtgcgggtcggtgtgcctgcggtggtccatccatgcctcgtcgttccattcgtggtccgattcgacgacgatggagccggtcgccggcggaatctcgtgggagcgttccatcgggtcggccttcatcttccactcgtggttcgcgttgagcagctcgtacttgtagacctcgcccgccttgacgccggggatgaagatctcccagatgcccgaggaaccgagctcgcgcatggcgtggcggcggccgtcccaggagttgaagttgccgaccacgcggaccgcgtgcgcgttgggcgcccagacggtgaacgaggtgcccacgacctggtggccgggagcaccgtcggcgccgcccatcgggtcgtcgtagcggcgaacgcgcgcgcctagggcctcccacaggcgttcgtggcggccttccccgaacaggtaggcatccatgtcgccgatggagggcaggtaacggtacgggtcgtcctccatgacggacttgccgccctcgtaggtggtgcatacacggtagtcgggcacggcccagccgtccgcggtcttttcggccgcgatgacggccacgaagacgccgttgaattcgtgccgggcctcggccgttcccttctgggtgtatatggtgacgctcttggccagtggcctgagcactcggatggtgacggttccggcgtggtctccggaaccgaggtgaccgcccagcacttcgtgcgggttgtagaacgttgcattgctcaccgcgctcaaatcactttgattcactggcacgggagcgatatcttcattgatgttcgtgtaagtagccataacacagagggtaataccttcggggcactattgcgagattttggcgagtcgtgtccggagtgtttccatcgtcccggttgtatggcataatatgtaaggttaagtatattgttttcacggaggattcatggggtacaaggtcggcgatatggtcgtctatccgcgtcatggagcggcaagggtcgaggccattaccgaacgggtggtcaagggcgtgaagcgggaatacttgcaactcaccgtgctgtcttccgacggtctggtcatcaatgttcccgtcgagaacgcgcagaaggtcggagtgcgtgacatcgtcgacgccaatgaggtcgccaaggtcttcgagatcctgcgtacgcccatcgtcgagaaggagatgaactggtcccgtcggtacaagctgaacgtcgagaagctggcgaccggtgacgtcaacaagatcgccgaggtcgtccgcgacctcgcccagcgcgacgtggacgagcacggcctgtccgccggcgagaagcggatgctcacccgcgcccgcagcatcctgacctccgagatcgccctgtccgaagaccttgacgaggccgagatccagcgtctgctcgacgtcaacctcggtttctccgagccgaagccgggcgacgagaagcatcacagcgaggcacccgccgagcctgccgaccggaccctggcccgcatcgaatccgaaagcaagaagtcccggcgcaagtagccggcggcgagcatgtccatgaacgctgttccagcgattggtcaagggtttgacgcgcatcgtttcgccgaggatccagcccggcagctatggctcgccgggcttttatgggatggcgccggtatcgagggggattcggacggcgatgtggccgcccatgccctgatcgatgcgctgttgtccgccgctgggctgggagacatcggcggactgttcggcgtgggagccgatgctccgggagccggcatgcacggctgcgatatgttgcgaagaaccgtcgatgtattgcgatcgcatggaaggatgccatccagcgccagcgtggtcatcatcggcaatcgtccgaagatcgggcgacgccgggaggaagccgagcgcgcactgtcggatgccgtcggatgccgggtgacggtgaccgccacgaccaccgaccatatgggattcaccggccggggcgagggaatcgccgccatcgccaatgcgctggtgatgtaatcgggcggaatcagcgatgacgcagcgacgtcacgcccttggcgatcgcccagaacagcgtcgacaacgtgacgatgatgaagctcgggggagcggggaacatcgcggacagcaccagaccgccccagatcgacaccaggcacagcaccgtcgcgatcaccatcgccttgaacggcgaggcgacgatggcgttcgccgtggcggccggggtgatgaccagcgcaaagatcagcagcgtacccaccgcggggaccgcgatggtgatgacgccggccatgatcgccatgaacgcaacgttcatcagcccgataggcacgcccttggcctgcgccacctgttcgtcgacggagctgaacagcagtggccggtacacgatggccagcacggcgagcaggatcacgtcgaacacggcgaagccaaggatctgatcggtggttatggtcaggatcgagccgaacagaatggactgcatctgctgcgacgcggacgacgagagtcgggcgaagaacagtccgaggccggtggcgaaggcgagcacggtgccggtggcgatctcccgctgcgtggcgcgcttgcccaacgctccgatgaccagcgcgccgcccagcgcaaacactcccatgccgagcgagaccggcagccccaacagcaccgcgccggtggcgccgggcagtccgatatgggccagcgcgtgcgcggcgaacgtcgaatggcgtgcgatggtgaaatatcccatcacgcccgcggcgagcgagatgcacaggcccgcgaggaaggcgttggtcatgaacggggcggacagggtgtacatccagtcgggatcgaaggagaaactgatgccggtcattgtgcccgccctttccgctcgtggtattcgtgatggtggaattgtgcgacctcgctggtgtcatgcgtgtcgggaacgacgtcatccgcctcgtcgggggtgggggtgacgaacatgtccccctgcggcgtggtgacgacctgcactttggtgccgtacaggtgcgtgagcagcttggaatccagcacgtcgttcatcgccgcgtagtgaggatgcccgtccagcagatagacggcgccggtcaggatcggcagcagcatattgagatcgtgtgcgacgacctggatcgtcatgccgagctccttgttgagccgtgccagcacatgcaccacggcgcgctggctggccaggtcgagattcgcgagcggctcgtcgagcatgagcagtttcgggccgcataccaaggcctgcgcgatggcgacgcgctggcgcagaccgcccgaaagctcggacagccggtagtgggccttgtcggcgatgccggtgaaggtcatggcctccttcaccttcgcgcgttgcgccttggtgacgaagtggacgccgaaacgggtgccggtcaggccgagcagcaccgactgctcggcggtgagattggagtcgatgtccgaagtgtagctttgcggcacgtacccgatctggcggttcatctcgcctgccgggcgtccgagcacgtgcacggtgcccccggcgagtgggaggaggccgagctccgttttcatcatcgtggttttgccggtgccgttcgtgccgactatggcggtgaccgaacccgccggtatggagaagtcgccgtgttgccagatcagccgttcgccgcgtttcaccgaggcgttgctgaacacgatgcagtcgggccgttgttcccggtcgccgctgttgctgtgcatatgattcatcgtcctgtctgtacgggaccggcatcacgtccgccggtgcgacatgtacggcaacgcattatcgcaaaggactatgacaatcattctcattagcggtggcggactcattagcggcggaagagacggcaatggtaacggtctggagcgggcgggcgaactcagttgctgctgccggcgccggtatcgcttttgtcgtcagcactgttgccggcatcgttcttggcgctggcgccgtctttgccgtcggaactgccgctttcgtcgctgtcgtcgatgatggcgggggagacggtcttgtcaagccgggccaccagatcggcgatccaatcagtcagcgtcgtgtacgcctgcggcatctgctcactgacgtcgaacacggggacgcctgcccgtccggccgtccctgtcagcatgttggtggcgtcgctggattcctgcgtgttgttgaccagcacgctgatgccttgtgattcgatcagcgactggaattcctgcaggtcggccggggcaggttcgccgcccgaggccgcggatcgggcgaaccccttgggagtgtcgtcctggaagcccatgtccgacatcaggtagtacgccacggcctccgtcgcaccgtacgtggcgttcttgtggttggcggcgaactcgcccatcgacttctcgatggccttttcctccttttgccatgccttgaggcgcgactggaacgccttcttcttggcggggagcgccttggaaaatgcctccgtcagttcggtcgccatgccgttgcgggcgtccttggagaaccataggtgggggttgtcgccttccatagctccgaccgtctcggcggccgagacgatggtcgagttgcggcctacggacttggtcgcccatgagtcgtatccggcgccgttcgacacgatgatctgcgctttctgcagcttggcgacatcggatgttttcggttcgaaatcatgcgcgtccacattcgtggagctgaggatggaggtgacgttcacgtcggtgccgccgatctgctcggcgagggagccccactggttgatggacgcgacgacggtgatcggtccggtcggctccttcgcggagggctgctcggattgcgagccgccgccggtgccgcaggcgctcgacgccatcagcatgcctgtggcgaggatggcggcaatgccggtgaccagacgatgcgggtgaatgttcatatcgctgccttcttcgaatatgccgtcgacggtccgccgtcggattgtcattgacctgagtccacgatagcctaacgctacgaggaatgaacgaactctagggaaggacgcacatgaccatcaaactcgatggcaagcgggtcgcggccgaggtcaaggcgaacctggcggaacgtgtttcaacactgaaggagcacggcatcgtccccggtctgggaacgttgctggtcggggaggatcccggttcgatgaaatacgtcgcgggcaagcatgccgactgtgcggaggtcggcatccgttccatccggcgcgaccttcccgccgacgcgagtttcgatgacatcgccgctgcggtgcgcgacctgaacgaggatccggcctgcaccggctacatcgtgcagctgccgctgccgcgcggcgtcgacgagaacgcgatcatcggcctgatcgatccctcgaaggatgccgatggcatgcacccatacaatctcggcgaactcgtgctgcatgtgcagggcgacatcacgaccccgctgccgtgcacgccgcgcggcgtcatcgaactgctcgacgcctacgacatcgacctgaacggcaaggaggtgtgcgtgctcgggcgcggcatcaccatcggccgcacgatcggtctgctgctgacgcgcaaggcggtcaacgccacggtcaccctgtgccacaccggcacgcgcgacatcgccgaccacatgcgtcgcgccgatgtcatcgtcgcggccatggggtcagccgggttcgtcaagcccgaaaacgtcaaggacggcgccgtgctgatggacgtcggcgtctcccgcgtgtttgatgagcagactggccgtttccgcatcaggggagacgtcgacaaggcctgttatgacaaggtttccgcatactctccaaaccccggcggcgtcggtccgatgacccgcgccatgctgctcgccaacgtcgtggagatggccgagaggaaaatgtagccgaattcgggcgtgtcgcgctggtttttccgcccattttgggcatggctgtaggtatcctgataacttgtgtgtgctcatatgagtgcacatgtataactgaatatcgagtaattattcatccactattagaaaccatatatttacatggcagagaacaacactgaagtcaccaaggtcgccatcaacgacattggcaccgaagaggacttcatcaaggcagtcgattccaccatcaagaacttcgacgatggtgatctggtcgaaggtaccgtcgtcaagatcgatcacgacgaggtcctcctggatatcggctacaagaccgagggcgtcatcccctcccgcgaactttccatcaagaaggacgtcgatcctgacgaggtcgtcgaggtcggcgacaccatcgaggcccttgtcgtcaccaaggaagacaaggaaggtcgtctgatcctgtccaagaagcgtgcccagtacgagcgcgcctggggcgacatcgagaagatcaaggaagctgacggcgtcgtcgagggcaccgtcatcgaagccgtcaagggcggcctcatcgtcgacatcggtctgcgtggcttcctgcccgcgtccctcgtcgaaatgcgtcgcgttcgcgacctctccccgtacatcggccagaagatcaaggccaagatcctggagctcgacaagaaccgcaacaacgtggtcctgtcccgccgccagtacctggaggagactcagtccgaagtgcgcgagaccttcctgtcccagctcaagaagggccagatccgcgagggtgtcgtgtcctccatcgtcaacttcggcgcgttcgtcgatctgggcggtgtcgacggcctgatccacgtctccgagctgtcttggaagcacatcgaccatccgtccgaggtcgtcaaggtcggcgacaaggtcaccgtcgaggtgctcgacgtcgatctcgaccgtgagcgcatctccctgtccctcaaggcgacccaggaggatccgtggcagcgcttcgctcgcacccacgttcccggccagatcgtcaagggcaaggtcactaagattgtccagttcggtgtcttcatctccgtcgaggatggcatcgagggcctggtgcacatctccgagctggcgaaccgccacgtggagaacccggagaccgtcgtcaagcccggcgaagaggtcttcgtcaaggtgattgacgtcgatctcgaccgtcgccgcatctccctgtccctcaagcaggccaacgactccgtcgacccggcttccgaggacttcgatccggctctgtacggcatgccggcagagtacgacgagcagggcaactacaagtaccccgaaggcttcgacccgaacaccaacgagtggatcgccggttacgagaagcagcgcgaggaatgggaatcccagtacgccgccgcccacgaactgtgggaggagcacaaggcgttcgtcgccaaggagctggagaacgccgcggcttccgctgccgaggatggccaggctccgaaggaagagaaggtcgaggagacctccaactactcttccgacaactcctccacgggtactctcgccgactccgaccagctcgccgctctgcgcgatcagctgctcggcaagtgagtcatctcatcccgagaagaagtagaatgctggtaggatttgccggcagataggaaaacgggaatcgccccacacgggtggttcccgtttttcatattccgctcccgccggcgggagcggtcgagcatagcgagactgagggtggtctttgcgagatgccggtcattctcacttcccggctgccttgaacaaccgcgacacgcccggatatccagcaagcctgccatgcgcgaatcagtgaaatggcggaatgctgcgagagtccaaaaaatcgccttccatctctgccacgaaaccgggcgtgtcgcgaatagcatgatgtcatgagcattcgtatcggactgaccggaggcatcgccgcgggcaagagcaccgtcgccgcccggatgcgggaactcggcgcgctggtcatcgactatgacggacttgcgcatgagatcgtggcgcccgggggagtggcgttgccgcggatcgccgccgtgttcggcccggacgcgctgctggccgacgggtcgctcaatcgggcgtggctcgccgagcgtgtgttcggccgtgacgccgctcccggcgcacgcgaacggttggacgacatcgagcatcctctgatatatgccgaagccgcacggctggagcgacggaatcccggcgcgaaggtcatcgtccatgacgtgccgctgctcacagaggtgatccggtcgattccgttccaattcgatcacatcgtcacggtggaggcgccggaacagatgcgcatcaggcgcatggtcgcgacgcgtggcatgaccgaacggcaggccgcagaccgtatccgcagccaatcgagcacagccgagcgccgggagcttgccgacatcgtcatcgattccacccgcccgatccccgacatgctggcgcaggtcgatgggctgtatcgccggtgggaggctcactgaatcattcgcccgtgaaaaggtgtgagcccggcagcgccgcaaaacgcacatgaaacccgcccaatcactgtatttccaaggcatgcatgttttgtgcgattgtgctgtcttgtgcgttatcctcgcacttttcttattgagaaccgttcgctgagcggatggcggtaagctggaagccatgggattcaacatcgagcgcgccgacaagccattcgtcgtcaaatcaccgtacaagccgtccggcgaccagccgcaggccattgaggagctggccacccgcatcgagaacggcgagaacgacgtggtgctcatgggagccaccggtacgggcaagaccgcgacgaccgcatggctcatcgaacggctgcagcggccgacgctcatcatcgagccgaacaagacactcgccgcgcagctatgcgccgaattccgcgaactcatgcccgacaacgcggtcagctacttcgtcagctactacgactactaccagcccgaggcgtatataccgcagaccgacacgtacatcgagaaggactccaacatcaacgacgatgtggagcggttgcgccatcaggccaccgcgaacctgctcacgcggcgtgactgcgtggtcgtcgccaccgtttcgtgcatctacggcctcggtacgccggaggagtacgccggccgcatgctgttcctccaggaaggccagcagattgaccgcgatcagctgcttcgcaagttcgtcgacatgcagtacaagcgcaacgacatcgcgttcacgcgcggcacgttccgcgtgcgtggcgacaccgtcgagatcatcccggtatatgaggagctggctatccgtatcgagttcttcggcgacgagatcgaccgcatctccacgttgcatccgctcaccggtgacgtgatcgaccacgagacctccgtgcacatcttccccgcctcgcattacgtcgccggccccgagcgcatggagcatgcgttgaagaccatcaaggaggagctggaccagcgcgtggccgaactcaagaagcagggcaaggagctggaggcgcagcgcctgaccatgcgcaccacatatgacctggagatgctgacacaggtcggcgtgtgctcaggcgtggagaactattcgcggcatttcgacaaccgcgcacccggtacgccgccgcacacgctgctcgacttcttcccggatgacttcctgctggtcatcgacgagtcgcatgtcaccgtgccgcagatcggcgcgatgtacgagggcgacgcgtcccgcaagcgcacgctggtcgaacatgggttccgtctgccgtccgcgatggacaaccgcccgctcaaatggccggagttcctggaccgcgtcgggcagaccgtatacctgtcggcgacgcccggcgactatgagctcggtctgtcggacggcgtggtcgagcagatcatccgaccgaccggtctggtcgacccgaagatcgacgtgcgcccgaccaaggggcagatcgacgacctgctcgccgagatcaaggaccgcgtcgacaaaaacgagcgcacgctggtgacgacactgaccaagaagatggccgaggatctgaccgactacctgctggaacgcggcatcaaggtcgaatacctgcattccgacgtcgacacgctgcggcgcgtcgaactgctgcgcgaactgcgcgaaggcaagatcgacgtcatcgtaggcatcaacctgctgcgagagggactggacctgcccgaggtatcgctggtggccatcctcgacgctgacaaggaggggttcctgcgctcgtaccgctcgctgatccagaccatcggtcgcgcggcccgcaacgtatcgggcacggtcatcatgtacgccgacgagactaccgacgcgatgcgcaaggccatcgacgagaccgaccgtcgccgtgtgcggcagatcgcctacaacaaggagcacagcatcgacccgaagccgctcatcaagaagatcagcgacgtcaacgacatgctcgccaaggaggacgtggacacggccacgctgctcgaaggcggctaccgcaacgcgggcaaggccggcaacacccatctgggtgtgccctccctcgacgccgcggaggccgacaagcgacatgaggagatactcaaggcggggcttcccgcgcaggatctcgccgaccttatccgtcagctgagcgagcagatgcacaccgccgccgaacagctccagttcgagctcgcagcacgcctgcgcgacgagatccgcgacctcaagaaggaactgcgccagatgacggaagcgaacaagtgagcatttcgtgacagagagcgtcacagccctttcctatgctggtagacatgtctgaaacccctgtcgcttttatgatcgccacctttgcggtgctgatcgcgtttttcgttgtggatctgttcgtcatcggccgcaagccgcatgtgcccagcaccaaggagtgcgtgcagcacatcgcctttttcgtggtcatggcgctgattttcggcggactggtatggtgctttgccggttcgaagcccgcgatcgaattctattcgggatggctcaccgagtactcgctgagcatcgacaacctgttcgtcttcgtcatcatcatgtcgaacttcgccgtgccgaaagtgctccagaagtacgtgctgtccgtcggcatcaccgtcgcgctgattctgcgcggctgcttcatcctggtcggcgcggccattgttcagcggttcacgtgggtgttcttcctgttcggcgccttcctgatctatacggcgatcaagctggtcgtcggaggcgatgatgatgaggaataccatgagaacggcctgatccgcatgctgcgcaaggtgattcgcatcaccgacgattatgacggcgagaagctgcgcaccgagaaggacggcaagtcgtactggactccgatgctgatcgtgttcctgaccatcggcacgacggacgtcatgttcgcgtttgattccattcccgcgatcttcggcctgacgaaggatccgttcatcgtcttcacgtcgaacgtgttcgctctgctgggcctgcagcagctgtacttcctgctgggcgcactgctcgacaagctcgtctacctgccggtcgggctcgcgttcgtgctcggcttcatcggcatcaagctggtgatggaggcgttgagcggcaatacgctgccgttcatcaatggcggtcacccggtctcttgggtgcccgaggtaccgacgtgggtgtcgcttgtcgtgatcgtcgtcgccatcggatcgtcggccatcgcgagcgtcatgaagatgaagtcggtcgaggccgcgaagagcgaagcctgagccgcccaaaagatgtgagcgctcacaacacgcccgtgaaaacagtggctcacgtcgcccaaacctagtacacttgcctgtggcagtggaagtcgcaagacttcttcctagaagaaatcacataagaataggtaggcattcatgcgtaaagccaagatcgtagacaccatcggtccttccaccgagtctcccgaaggcatcaccaagctggttgaggccggtatggacgtggcccgtctgaaccgttcccacggcactccggaggatcacctcaaggtctacaacaacgtgcgcgcggcctccaaggcgaccggtcgtaacgtcgccgccatggtcgatctccagggcccgaagatccgctgcggctggttcaagaagaacgccgagggcgaggacaaggtccagcttgaggaaggccaggagttcatcatcaccaccgacgatgtcgaaggcgacgagcacatcacctccaccaccttcaagggcctgcccggcgactgccaccccggcgacccgatcctgatcgacgacggcaaggttcgtctggaggtcaccaaggtcgagggcaacaacgtgcacaccaaggtcgtcgttgccggcccggtctcctcccacaagggcatcaacctgcccggcgtggccgtgagcctgcccgccctgaccgagaaggatgaggccgacctgcgttgggccatccgcaccggcgccgacatcatcgccatgtccttcgtgcgtttcgccaccgacatcgaccgcgcccacgagatcatggacgaggaaggccgtcgtatcccgatcgtcgccaagatcgagaagccgcaggctctggagaaccttgaggacatcgtcaagacgttcgacggcgtcatggccgcccgtggcgacatggccgtcgagtgtccgctggaagaggttccgctggccaccaagcgcatcatcgagctggcccgtcagtacgccaagcccgtcatcgtcgccaccgaggtcctgggctccatggtccactccccggttccgtcccgtgcagaggcttccgactgcgccaacgccgtgcttgacggcgccgacgccacgatgacctccaacgagaccgccgtcggcgagtacccgaccgagaccgtcgccacgatgagccgcatctccggcttcgccaccgagcacggcttcgaccgcatccccgagctgaagaacctcgacatgtcctccaccggcgccgtttcctccgccgccgtcgacctggccgagaagctcaacgccaaggccatcgtcgcctacacccagaccggcaacaccgtgcaccgtgtgtcccgcgagcgtccggccgccccgatctacggcctgaccaccaacgagcacacctaccactggctggccctctcctggggcaccgaggccttcctgctcgatgaggactaccacgacaagacccgcaaggatctcatggccttcaccgacaaggtcctcaagaacgccggcaaggtctccgacggcgacaagatcgtcgtgctgagctccgctcagggcgagcacgccgctggcagcaccgacaccatctacgtgcacaccgtcggtgccaacgactgatttcagccgatagcagattcggcttccgctgtgtgacgacggaagccgaatactcatgcgtgagcccccgctccgaaacgagcgggggctcacgcgctttcgccagggaatcgcatcggctcaaggacgatgcggaaggtcgtcgcgcggatgcggggcagatgcgcgactgtctcgtgcggaaggcgaaccgcacaatctcacatgctcacatgccgatgtgctccagcagtccctcatgcaggcgaaggatcgcgataatcgtcttcgcatcaacgatggtgccgttggtcaccatctccatggcctcctgttgcgtgtacaggcgtaccgcgggacgtggcgtctccgggccgatcgcggaacggtccacctccttgagttctgtcgccagatacagcgcggtgtactgcgaggagaagctgggcgtgttgatgaagcgcgtgaactgggtgagcttcgaagcctcgtagccggcctcctcgcgcagcttgcggcttgcaacgtccagatactgctcgcttggcgcgttggcatggcctgccggaatctccaacgtccagcgatgggtcgggatgcggtactgctcgacgaacggaatcttcccgtcagcggtcaccgcaaggacgccgacggtgtccccgttgttctcatgcaggatgaaccgttcgaactggccgacctgcgccgaactgaacgcgaccctgtccacgttgaaataatgggtcttgacgatttgcttgcgggactcctccttgaccggtgtcggacgccacggatcgaagggtctgtaagtgtcactgtccatgctcataagcctcacctttgatagttctcttatgtgtttccattgtaggtccgcgctggtgagttgcggggatattcggcgcggcgttgatgctaccggcgtaaatcgcgtgtcggggcgtatggtgtccacggaaccggcgtgactcgctggaatgatgcgcggcacgcctgcaatggacgaatgacgtagcgatatgctaaactatcgcgagtgccagaaacgccctcgtatcccaattggtagaggaagcagcctcaaaatctgcgcagtgtgggttcgagtcccaccgagggcacgttgcattatcgggtgagccacagtgtcgcatcgccgaatctctatgttatcgttatacatgaagttttgtcgatgaatcactgtgtcgtggaaaagaggttgtgagcatggtggcaagaaagaagacctcaacgcaagagcaagagggtcaggtagaggaggtgctttccgccgacgagctgaaggcagtctccgaaggcgagcccgtcgagagcgccgtgcacaagaagcgcacggtcgttgtcgccgaggacgagtcggtgaaccgcatggatctggtggccatgctggaggataacgggtatgaggtcgtcggcgaggcggccaatggtgaggaggccgtcgatttgacgcgcaagttccgcccggatatcgtgtgcatggacgtgaagatgccccgtatggacggcatcgccgccgccggcgtcatctgcgacgagaacatcgctcccgtggtgatgctcaccgcgttctcgcaacccgacctggtccgtcaggcgaccggtgcaggtgccatggcctacgtcaccaagccgtatgaggaatccaagctgctgcccgccctggaagtcgcgatgggccgtttctccgagatcaacgacctgctcgacaacgtcgagaccagcgagaacaagctcaaggagaccgaagagcagctcaagaaggccgaggagaaactcaagaaggccgaagacacgctggaggagcgcaagctcgtcgaccgcgccaagggcctgctcatggacaaggcggacttctccgagcagggagccttccgctggatccagaagacctcgatggatcagcgcatcccgaagaagcgtctggccatggcgatcatcgccaagtatggcgatcccaagccgtcggaagtaggggaatgagcgaatcgcgcgacgacgcccagacgaaaacgcgtggaacgttgctggtggtcgatggccactcgcttgcgttccgcgcgtttttcgctttaccggcggaaaatttcagtactcaggccggacaggccacgaacgcggtatggggtttcgccacgatgctgtcccaggtgctggacagcgagaagcccgaccatctcgcggtcgcgttcgacatgaagggcggcaccttccgcaacgagatgctgccgcaatacaagggcacccgcgaagcggcgccggaggacctgctcacccagctgccgctcatccagaagatgctcacggcgctgggcgtcacctacgtcgaaaagcaggggtacgagggcgacgacatcatcgccacgctcgccgcgatgggggagcggtccggatacgacacgctggtgctgtccggcgaccgcgacgccttccagctgatcgacgagcgcgtcaccgtgctgtatcccgggcatcacttcaaggacctcaagcacatgacgccgcaggcggtggaggacaagtaccatgtcggccccgcgcaatacccggatcttgcggcgttgcgcggcgagactgccgacaacatccccggcgtgcccggcgtcggcgacgggttcgcggcgaagtggatcaaccagtacggcggacttgagggtatcatcgagcacgccgacgagataggcggcaagaagggcgagtcgctgcgcgagaacatcgagcaggtcaagctcaaccgcaaggtcaacgcgctgcggcgcgacgtcgacctcggtatcggcatcgaggacctgacattcggcgaggtggacgccgacgcgctttcggaactgttcaccagcctcgaattcggcccgcgcacccgcagcaaggtgctcaagtcgttcaacgccggcaagcaggccggcgacgcagctgacaagcacgcagacgacgaggacactcctccgacgacctgaggattcccgaggccgtgaccatcgcggatgaggcggcgttggcggcatggatcgactccgcacgagacggtctcggctcgcctgccgacaattctgatgatgagccgcgcaaccgggcgcactgcgccgacgtcatggcatcgacctgcgcgctgtatgccgaaggctcatccaaacccgggaacccgggatgcagcgtgctgatgctggaggtcggcggcaaggcggccgtgctggaagccggcgtgatcaccggcgtccgtcccgcgttgcagcggttccttgacgggcacgccgaccggatagtcgtgcacgggtacaaggagcagtcgcacatcctcgcgtcgctcggactggacctcgccgagccgtggttcgatacgaaactcgccggatacctggtccagccggactatcatgccgattcgctggaacaggcggcatcccatttcctgcagctgcaattggacaatgccgatgacgtcgcgcaggggcagctggacttgagcggcgacgtcgatccggccgaccagcgcaaggatctgcttcatatggccatggttcgcgccctcgccgacatgctggccgcgaagatcgacgaacgcgagcagttcaggctgctgcagtccatcgagctgccggtgtcccacgtgctgttcggcatggagcaggtcggtgccagcgtggacttcatgcgcctgaccgagatgcgcgaccggttcgccgtcgacgctcgcgacgcgcaggagaccgcctggcagttcgccgggagccgcgtcaacctgcaaagccccaagcagttgcaggccgtgctgttcgacgacatgggcctcaagccgaccaagaaaacaaaatcgggttcgtacacgaccaatgcgtccgcgctgcaggatctcgcggtccgatccgtcggcaacgagcgcgccaacggattcctgaccgcgctgttgcgacatcgcgagacgaacaagctcaagcagatcgtccaaagcctgatcgatgcggtgaaccctgatgacgggagaatccacaccacgttcgagcagaccgtggccgccaccggacggctcagttccgttgagccgaacctgcagaacatccccaaccgcaatgccgagggccgcgagattcgctccgcgttcgtgcccggagagggctacgagtcgctgttgagctccgactactcgcaggtcgagctgcgcatcatggccgacctgtcgggcgatgacgcgctgatcgaggcgttccgctccggagctgacttccacaagtacgtggcgagcctcgtgtacggcatccccgttgacgacatcacccccgaccagcgcacccacgtaaaggcgatgagctacgggctggcgtacggattgagcacctacggtctcgcccagcagctcaaaatcagccccggcgaggctgaccggctgaaatcgcagtatttcgcgacgttcggcaaggtccacgagtatctggaatccctggtcgccgacgcccgcgagaagggctacaccgagacgatgttcggcaggcgtcggtacttccccggactgcagtcgccgaaccgcaacatacgcgacgccgccgagcggggagcactcaacgcgcccatccagggctcggccgcggacatcatgaagatcgccatgatccacgcgtccgacgcgcttgccaaggccaaggtccgtagccgtatcatcctgcagatccacgacgaactcgtggtggagatagcccccggcgaagccgagcaggtgacgggcctggtgcgcgacgccatggagcacgcggtcgatctcgccgtgccgttggacgtgtccaccggcatcggctccgactggcagctcgccgcccactgacggcgacggcacggcggcgagaacaacgacggcaagaaaagaaaagaggacaagccatgaccacgcttcgacaggtcgtcaacgtagtggaaaccctgtatccgctgcgctatgcggaatcctgggacgcgcccggcctgatcgtcggcgagcccggtgccgacgtcggactggtcgcattcgccgcggaccccaccatggcggtgatcgacgaggccatcgaacgcggcgccgacctgctgatatgccatcacccgctgctgttccgttccgtgcacgccgtctccggacaggacgtgcacggcgccatcgtcggcaaactgtacagccatcactgtgctctgtgggtgggtcacaccaacgccgatgccgcgtggcgcggtgtagggcaggctgcggccgacgcgttcggcctggtcgatcagcggcctctggtgcccatcgacgacccggggtctgcgcacgccgtgggcctgggtcgtgtcggcctgctggaggagccgatgaccttggagcgtttcgcgcatcgcgtggcgcaggcgctgccggccacgaatcttggtgttcaggtcgccggcgacctccagtcgctcgtgcggcgcgtcgcggtgctgccgggatcgggggactcgctgttcgacgaggtgcgggccagcggagccgatgtgtatgtgaccagcgacctgcgccatcatccggcgactgacgccttggaacaggcgcggtacgaggcgtcgctgctctcgcgcggactggccgccccctcggccgggaatacgggaacggcagggagcgccgtcgcccgtccggcgctgatcaacacgccgcactccgccatcgagtcgctgtggttccgatacgccccggacgacatcgccgcggcggtcgggcgggcgacgggggagaccatacgcaccacccatatcacgatgaacaccgatccgtggacgctgaacatcccctgccggggctagccggctgccgctgcacatcgctgacaacttctttcgaaaaaggaccattcatcatgcctgaccgttcaaccgctgacaccgctggcactgccgaaaccgctggtaccgccgccgcaagcgacatcacccggcaggtcgacgcgctgctcgaccgctccaccgacggcatcgtcatggacagccgggatcgcagggccgtcgtgctgtcacgacagaccgtgtaccaaggggcggtgttcgacgtggaggacatgcgcatcgcgctgccggccggtggcggggactgcgtcaccgtgcgtcgccaggtgtgccgtcacgcgccatgcgtcgtcatgctcgtccatgacgaggcccgggacctgtacctgctggagcgcgagtaccgcgtaggatccgacctgttcgcctacggtctgccggcgggactgatggacgatggagaggacgtggagcaggcggcgctgcgcgagctcgccgaggagaccggcgtggtgccggtcggagaggacggcgtcatattcgaccatgtgggggcgttctactcgtcggaaggcatgagtgacgagctcgccaacatcatggtcatgcacctgcgacgctgggaaagccgaccgcgccggttcgatcccgacgaacacgtggaatctgcgtgggtgacctggcgccaactcgccggagtgccggtcaccgcgtcgaactccgtcatcgccatacagcatgagacgattcagcgaattataaaaaaaacaacaagtattcatggtaaaacaaacatagtctgctgagaatttttctttatatcggtttgaagttaactatgttcacgttggcgtgcgataatatgaccatgcagcaaatacgacccggctccatgtacccgttgggtgcgaactacgatggttctggcgtgaatttcgccttgttctcgcaggtggcggacaaggtcgagttatgtctgttcgacgaggacgacaaagagacgcgcatcgagatgaccgagcagaactcgtacgtctggcataactatatttccggaatccaacccgggcaacgctacggttaccgcgtgtacggcccgtacgatcccgccaagggcatgcggtgcaacccgaacaagctgctgctcgacccctacgccaaagccatcgaaggcaacatcgacggcgacgaaagcctgttctcctaccgtttcgccgacccggacggcccaatgaacgacctcgactcagccgatcacaccatgaagtccgcagtcgtcaacccctattttgactggggcaacgaccagcatccgaacacgccataccatgattcggtcatctacgaagcccacgtgcgcggcatgaccaacctcaacaaggacgtgccgccacagattcgcggaacctacgccggcctcgcgcacccctcggtgatcgaatacctgaaaaagctcggcatcaccgcactggagctcatgcccatccatcagttcgtcaacgactcgttcctgcaggaaaagggactgagcaactactggggatacaacaccatcgggttcttcgcgccgcacaacgcctacgcatgctcaggccagcgcggcgagcaggtcaacgagttcaaggcgatggtcaaggcataccaccgcgctggcatcgagatcatcctcgacgtggtttacaaccacaccgccgaaggcaacgacatgggcccgaccctgagcttcaggggcatcgacaaccagtcgtactatcgtctggtagatggcgatccgcggcattacttcgacaccaccggcaccggcaactcgctgctcatgcgctctccccacgcgctgcagctcatcactgactcgctgcgttattgggtcaccgaaatgcacgtcgacggcttccgctttgatctggccgccacgctggcacgccagttccaggaggtcgacaagctgtccgcattcttcgacatcgtcgaacaggacccggtcatctcacgtgtcaaactcatcgccgaaccgtgggatctcggctccggcggctaccaggtgggcgggttcccgtcgagctggtccgaatggaacggccgttaccgcgactgcgtgcgcgacttctggcgctcgcagccgtccacgcttcccgagttcgccagccgtctgctcggcagctccgacctgtatcaggtcaacggccgcaggccggtcgcttcggtgaacttcatcaccgcgcacgacggcttcaccatgaacgatctggtcacgtacaacaacaagcacaacatggccaacggcgaagacaaccgcgacggcgaaagcaacaatcgttcatggaactgcggcgtggaaggccccacaaccattagcgatgtcaacaacctgcgccagcggcagctgcgcaacctgttctccacgctgctggtcagccagggcatcccgatgatctgcggcggcgacgaggtggaacgcacccagcagggcaacaacaatgcctactgccaggacaacgagatatcgtggcgcagctgggactccacgcccgagcaggaggacctgctgcagttcgtgtccaagctgattcatctgcggctggagcatcccgtgctgcacaggcgccgcttcttctccgggcgtgagccgggcgaggacgtctcgacgatcccgcagatcgaatggttcgaccacaccggatcaatcatggacatggatgactggtcgaacacgcacgcgttctcgatgatggtgttcctcaacggctcgcgcatccccgagactgactggtacggttcgccgatgatcgacaacgatttcatcctgatcttcaacgcgcattacgagccgatcatgttcacgctgcccagtgagcggtatggcaagaagtggcagctgctcatcgacacatacaaccccaaggggccggagctgagctatgaggcgggattcgccatcaccgcccaggcgcgcagcttcctgctgctcaagagttctgattgcccggcggtacgtcgcgaggacagctgagatctcgtggcaggtgcttcgcacctgcgcgctgtgtgcgctacgctgggcaggcgccgaccggtgacttgcgtgttaccggtcgttcgacaggcgggattgcagttccgcgacctgctcgttggtgccggagccgtccgcgtctcgggctggattgccggggccggcaccggtgctgtcaccagtgccggtctgcagcatcatcagctgatcctgcagacgatcggcctcgattgcggcgatttgccttgagaagacgatgaaccatcccagaaacagcagtccggcgagcgcttcgagattggtgagcgtttcctggcccatcagcatcctgatgccgatggcagagcagatcagaatcgccaaggcggaaatcaccgacatcaccttcggtatccgcggggcgagccacggcagggagagcatcaacacgcccatgatgaccgtcagtcccttggcgcacacgttgtgcatgatcgggtgcggcgtatagcggaacgcgccgatgcctatgaacatgagcccggatatggtcagcagcagcgacaggatggcgatacgcaacgtgaaatgcgcgatgtcgcggtcatcggcggcggtgccggtgcttttgttcatctgatggcgtgctcgctgtatgcgttcggtggtgatcagctccgagatggcgaagtagctgacgatgatgatgcacgttccggcgagcatcagcgtcgagttgaacatgcgggccgcgaacgtggtgcggtcgccgagctgcgagaaattgttgtggtaccagtacgggtcgtcggtggtcaggccggcggtgcacacgccggaaatcacgaagaacggcagcagcgaggccaacgtcttcgcgttcatcatctccgcctgcacgaacgtcatataaccgacgacgcccgcgaagccggcgcagatgggggtgaggtatccgctgaacgtcgccgaccccatcatgccgttgattgcgccgagtagggcgaatgacgagaggaacacggtcgccgcgtacacgatcgacaatgcgaggatctcgaacacgcgacgaatcggggcgaaccagccgcgatgcaggttgagcgaatgggagtggctggcgtaaccgacgcagaatgacagggcggcgcaaccggccagaatgcccgcgcacaccatgaaacgtcgttgggtgatctgccagatcgccggggcgaactgcatgtacagcgacatcattatcgcgccgaccatcgcgcagatcaggaatgagatcagaccaagggtctccgctcgctgatgacgtcccatgacacccctttcgccgtccggatatccattgtactcgtgcggtttcgcggctgtgttgcgttggtggccggggaggggggcggtgcgggacgagattgtgacgcgacggtacggggttatgacggggcggcgtgggacgatgaccggtatgcggcgtggtgcctgttcgtgcgtgggatgtgtcgtccggatttgcgttcctaagtgcgcgccgaaacgacgaccgtgcgcacataggtacgcaaacagggccatttgcgtacctatgttcgcgcactcgtcgtttcggcgcgcacttaggaacgcaatgggaggggcctacattgcgccgattatttggaccatcggcggggtggaagatgcgggtcgagtccaatggccccggattcggttgccaaggtctacggaacccggtgataattgaaaaacgggctcagtctcggcctatggtatactcaacatttgtgctttgccttgggctgggcacatcgggctgtagcgcagtttggtagcgcgcctgctttgggagcaggatgtcgcaggttcaaatcctgtcagcccgaccggagccctactcccgcttggggagtgggagtagagcttgaaatcgtgttgacggacgttgtcgctgcagtggccttcggtgcggtggcggaggccgcctacatcgtctaaggagcatcatgcggatatcggcaccgtgatcacgctcgggtccgggttcgtggcgttgatcgtgcccgcgttcgttcgggtattcaagaagtatattccccagcggatacgtcggatccgtgttcctcgccgcatccatccggttcggcgtcatcgccatcgccgccaccggcggattcgacggtacttatatatggggcatcgtgctcgcgggcgtagtgggcgtcgctcagaccgtgtacgcactcgtcaaccaagcctttgacggaagactgtctaaagcgtagaacagtgccgggtaaggcccgaaatcctgcgcactttgtgatttgagtttcctggaagaggatatggcccgtgccgggtacgattttcagtcgctaacactagaaaaccgcgattggaaagaggcagaggccatgtccaaggaaatcatacagttcgatgacgccatgttcgagacaaagctcgacgccatggtgcgtgacaaggtagaacaaatagtcaacgcgatgcccgacgcttcaggccgacgagatcgccaacgccgcgagatacgaacgaaccggcgaacgcaaggcgtaccgtgccggccactacgaacgcagcctgaccgccaaggccggcaggccggagccgaaggtgcccaagctcaaaggtgccctgttcgagtcggcggtggtcgaacgctgccggcggcgcgagtccggcgtcggggaggcgcggaaaccgcactgcatgaagaacagccgcgcggtgatgctggcatggacggtgagccgatcgatgccggctgcgtcggcgaaccgctcgacttgtccgagcaatagcgaggccacgccctgccgggagcatgaggaatccacgaacagcatgtcgatatacccggctttgtcgacgtcaatgaacccgaccggaacgttctaggtttcggaagattcccgtatggggtcttcgagcggatatttcgcggtttcggcgacccatgtgtgcaccgttatccggcgttcgttccattgcccaggtgtgccggtatgcccggcccatgcgcgaatctgttcgctgttgtaatcccgggaggcgatgccggtcgcgggccgacggaacaccgccatcgtggcctccgcggcatcgggccgatacctgcgaatcatgaaacgcatacctgaaagtgtaagggaaatcaggcatacggcgcggagaacgatgtcgtcgcaatccctcgcagtctgtgagccaactcgtgagccaaccgaccaacacgacattcaggtcacgataattctgatgcgcccggtcgcatctcactgccacatcacattgtcgagatccgcaccgaatcttgtcgcgttggcttcaatcaaccaaccagttctggcgcaaacgcgattcaatggttctcctgcttgccgcgcaggaacacgatcgggatgatgatcagcggcgccgcgcatgcgcccatggccagtgaataaccgctggtgagccactggccggtctgcatgctgacgcccaaatccttggtgatgggcggcagagccgtggtgagcgccgtggccatgacggtggtggcgatgcacgagagcatgatgttgatgaagatcaacgtgcgacggtggttgctaagaggtgctgttcggtggtggttgttgtgacgtgtgtagtggtgtttggcatgattccgtttcgatttttggctctctgcggaggctcaagttccaactaaaggttttgcttatcgagctcttggtagtgctctttgatcacggtgaggatttcggcgaattgttcgcgctgctgagcggtgagcacttcgagcagtttaccggtggctccgttatcggccgcacgtcggcgcatcgcctcggccttgccctcctcggtgagcgcgaccagataggtgcgcccgtcttcgggatggggagtgcgcgcgacccatccgcgcgcctccattttgccgagcaattcgctcagcgatgccgaccgtataccgaggatcgcggcgagccggcgctggctgaccggcccgagaccactgacggtcagcaggcagcgcgactggccgctgccgtatatcagcgaatggtcgcgtcgtgtttcgcgttgatggctgatacgcgccgcatcatagaacagctccgccagcgctttgtcgttcattgtcgtgttcgtccgcctccatcgtttttgcaaggtacctaatgagtaatacaaggtaccttgacaaatgagttcaggttacggcgcattcgggcgaggctattcgtcctcgcctagcgcggcggatgggggggtgagcacgctggtataggggatgtcgccggacaggacgccgtcgtagaagcgctgtttggcgtcgatgaagtcgatggaatcccgaatctccgcgagctgctcgaccagccgcgcccgcttgtcggcgagcatctgcttgcgctcggggatgctcggctcgccttcaaagcacagttcagtgtatcggcgcatttcttcgatgctcagaccgcaacggtgtaggcacagcagacctttgatccatgtgatgttgcggtcgtcgaagacgcggcggttgttggcatcccgtttgaggttcggcaccagaccggcgttgcagtagaacttcaacgtctcgtaggcgagaccggtcgcttcgcaggtctgcttcatcgtgtacatggtgcccctccttacgttcttttattatccggcagtgcttaccggtagtttctaccggtgtgtcgtgatttgaccggtagctactaccggaaaatatagtggcagtcataacacggctcccgttagagggaacaccaaccctgacatcaacgaaaggcaatacccatggagatcatcaccctgcgcaatggcgtcgacatgcccaagctcggctacggcgtcttccagatcgccaaggacgacaccgcgtgctgcgtcgccgacgccatcgaaaccggctaccgccacatcgacaccgcacagtcctacttcaacgaatccgaggtgggcgacggcatcaaggccagcggcatcgaccgaaaggagttgttcgtcaccaccaaggtctggctggaacactacggctacgagcagacgctcaaatcggtcgaggtctcgctcaggaagctcaagaccgactacatcgacctgctgctgctccaccagccgttctccgacgtgtacggctcatggcacgcgctcgagaagctctacaaggacggcgtggtgcgcgccgtcggcgtgagcaacttcttcccgtaccgtctcgcggacctcatcgcgttcaacgagatcgcgccgatggtcaaccagatcgagaccaatccgttcaaccagcaggttgacgcgcacgcctacatggcagaacacggtgtggtgcaggaggcgtgggcgccgttcggcgaaggcaagtccggcatgttcaccaatccgacgctcgtcgccatcggcgagcggcacggcaagtcacccgcccaggtgattctgcgctggctcatgcagcgcgacatcgtcgcattgccgaagtcgacgcacaaggaacgcatggcgcagaacatcgatatcttcgacttcacgctgacggacgacgacatggcgtcgatcgccgcgctcgacacccgcaccagcctgttcttcgaccacgccacgcccgcggctgtcgaacgaatggccacgctggtcaaagagcgcgccggacgggaatgacctgccggaggcggtgcatatagctcttcgccgacggcctgaaacgtagcgacggacaggcaagcgggcatgatggaagcgatatttcgccgcatcgcggaaacgcaaacaaacaaggaggagccatggccgtcgagaacgccaaggtactgatcatcgtgaacaattggggcatcgaggaaaccgagctgacccgcccgttgcgtgacctcaaggccgcaggagccgcagtgacgctcgccgccgcgacgctcgacccgtgcgaaacagtcagccacgaccggtacgagggcgagacgctcaccccggacgcgctgctgtcagacgtcaacgccggtgattacgacctgctggtggtgcccggcggcacctgcaacgtcgaccgcatccgcgtgaacgaggacgccatcgcaatcgcgcaggaattcgcccacgaaggcaagccgatcgccgcgatctgccacggcgcatggctgctggtcaatgccggactcatcgcagggaagaccgccgccccctgccgctacattcgtgccgatatcgagaacgcgggcggccattacgtggacgagcagctgcacatcgatgacgccaacggctggcgcctcatcacttcccgcaagcccgccgacctcgactacttcgtcgacgccatcaaaaagaccctggcctgactcatccgactcgggacgggcggcggcgaagtcggatgggccatcgttccagccggcctcgccgcgcggccaggcgagcgacagcctaagccgctcaggcgatgaaacgcagatatgtgagatcgtcgaaagtcgcgcgaccctgaaaccccttggtcgaccgataccggtcaatcagatccggatcttcgctgcgaagccgctgcagctcgcgttccgattcgtcgagcgtgggccgcagcagcggatagccatcagacgcgagcaccacctcatcgccgggagagacgggcacagtgcggatggggtacgtcatgtcggtgaacccgtcgaacacgaagtagccgaacggccctcgtttgttcgcgaactgcgattgcaaccgcaggaacggcagtatcatcgcgcgcgacgggtccttcggcgccgcatcggaagccggtgcgccgaacgagccggatatcgggacgtcgggcgtgccgtcctgcatctctcgcagcgcaagcaccgtgaacgcgcgcagatcaccgagcaacacatcgacatccttggtcgtcggcgtctgcacgccattgaccatgatctggcagtccccgaacagccacgcctcatgccgccgggcgctgtataccactgcgttgacctgcagacgttccactggctcatccgcgaacacccgaattccggcctcatgcgagcggtagcgggcctggaaacattcgtcaaccgcccgctgcatctgtcgcatcgatgcatccgcaggcatgccaccgatgacgccgagcatcagatccttcgccacgacgccgccacagatgccgcacgcttttgcttgtcaccccatccacgacggccgcgaagtcatccgtgaccagcatcccgtcctcgttgagcgactggtcgttccgcttgccccggcaataccgctctatgatacgcatcatcaggcccgtgcgcattgggcgaacgcgcggtagaggatgttccgcgtcgcgtcgccgaccgacccgtccaccagtatgatgtggtggttgccgtcgtcgcgctccgtgacatcgcgttcgccggtcgatgccacggcctggcgcaaggcggccatgtccgcatcccattgcggtacgggcgtgccgaacgagcacatgtcgaacacgaatgcgcaaggggtcgggttgaaggatgacgtcgtgcgctcgctgtatcgatatgtgtacgcgctcggtgttccatacggtcggcctacgcgcatgtaatcgtcgatggcgcggttgacgcagaagtcgaattgccggaagcctgacggcaagtacacgttgtagttgttcgccgcacggtcgagtttgtctcgccattggccgtcgaacatctctcggcgactgtcctcatgagcgccggggccgagcgtgtatgatccgagtcgagacaggtattccgcctgcaccgaggcggcgagctcctgcaacgaccctgcgcccaagccgcccgccgtcgtggtgctggtgctactgtcgtccggcatcgtgcgggtcaccgtcgtcgtgccgtccttcagcgtgaccacggtggtggcgatgccggtgtccccgtcgcgcgaactggtgcgggacacgaccttgccgtcggcatcgcgccgcgacggtgaagttgcggatgccgatgcgtcgggcgccgcgccggcaccgccctgatgcgaggtggcggcccatatcgcgatggcgaccgccgcgatgatgatgacggctccgatgacgaattccatgctggttcctttaatggcgccggtggtgattgcggtgctggccgctgttgaccatcctatcgtcgccagtgggccgccgcctgaataattccgaatggaaacgcggtcccgggctgcgctaatcgccgtttgaggtgtgaaatcgggattagtgtgggcgaaattggtggtatctacatttcgaggggttgatctgatggatcaggaacatctatctgcatttcagggggttgcccaaacgcgatatccgaagtattaagcgctttttgctgctgggattgcacggttttgggagcgttcatacttggctggcaccccctcgaaacgtagatagatgtccggcgagaccgaaatcaacccctcgaaacgtagatacggttcaatgacgatgtgattccgggcttttcgcccatgaccgggggagagaagatggcgaatcgcgccggaaaggggtcgtgcccgaaccgtgatgccccgtcatgactgcaacatggtggtgccgccgtccctgacgagcagtgattgacggtcagtgagcgcgcgtaggttgagctccgtggaataccgttcgacgatgagccgtgccgcctgacccatcgtgggattgcccagatgcggcaccacatggaaatccgtcagaccgagtcctttgtagtcgcgcagacccggggcgcgatccgtgcggtccatgatggagcagtagccgatgtccggcgacatgatgaccgaaccggctgattcgccgatatacgggatcccgtcggctatccgttcggcgagcagcgcatccgcgccggtccgccgcagttcctgcagcagaaagaacgaattgccgccgccgacatatatgcagtcggcgtccgagagggtgctccgcacgtcgggggcagcggccgttgaaacatccagttcagtgacgcggaatcccagttgacgcagttggcggcgggtcagcatcgtatgcgcgaacccccatggctccacggccgcggcggtcgtgatgtacgccagtcgaccgccgtgcagcccgggcagtgcatgcgggatcatccctgtggctccgcgcagcgtcgatgtgagcatcatggtcgccatcctggcctcctttcgtatcgcccagtataggaccgcgttcatgagagcgctgacagatgaaagatcgaatgcgcgcggtggcgtttggcgctcgcctggcccggttgccggaaatgacgacatgggcgcgaacgattccgccgatgcggacggaaaatgccataactcgaacgaagacgatacgattggacgcatgagcgaaacgaacaatgacaacctgtggccggccccgaccgctgacggcccgctgaacgcgaccgtgaccatccccggcagcaaatccctgtcgaatcggtacctgatcctcgccgtgcttggcgcgaagcccgtcacgcttgtcgggctgttgcgctcgcgcgacaccgaactgatgatgggagcgctgtcggcgcttggtgtgcgctgcgacatcgacccggaaaacgacaccacggtcacggtgacgccgccggaatccggccgattcagcggcaatgtgggcgtgtactgcgggctcgccggcacggtgatgcgtttcgtgccggggctggcgctgttcgcggacgccccggtgcggttcgatggagacgatcaggcatacgcgaggccgatgcagccggttctcgacgggctcgaacagcttggcgcccgcgtcgaataccacggcgagcacggccggctgccgttcaccatcacgccaccgcgtcatgatggtgaacaggccgatgacggttccgctgccgccaaggtgagcatcgactcgtccggctcttcacagttcatctccggtctgctgctgatcgggtcgcgcctgcccggtgggctggagttgcggcatacgggggagaagacgccgagcctgccgcatatccgcatgaccgtcgctgatgtgaacggcgcgagcggcaatgcgaccgctgatgaggagtctcgcgtctggcgagtcggccatgccgcgttgcagctgccggaacgcgtggtcgtcgaacctgacctgtcgaatgcggcgccgttcctcggcgcggctttgatcgccggaggcacggtgcgcgtgccgcactggcctgctgagaccacccagcccggtggactgctgccgggatatctggaacgcatgggcgcgcgcgtctcgttccccgaagaggacggcgtgcggtattgcgaggtgagtggcgacggccatgtgcatggtcttggtgatttcgacctgaccgcggcaggggagatcgcgccgtcgctcgcggcgatactggcgtttgccgatgctccgacccgtatgctcggcatcggtcatctgcgtggtcatgagacaaaccgtctggaggcgctggtcacggagatcacgcgcatcgggggagaggcccgcgaactggaggatggcatcgagatcactcctgtgccggttgaacgtctgcacggtgaggtgatggaatcctacgctgatcaccgcatggcgacgttcgccgcgatgatcgggctggccgtgccgggcgtcagaatcgtcaatgtggagaccacgcgcaagacactgcccgatttcgtgggcatgtggaccggcatgttggagcggtgaccgcgacgaatatcacggatatacgatgaggggctgattcccagcggaatcagcccctcatttatgttcgtccgtttgcgttagacggactgcggcctgctaacggcagttcgtcacttggtgaacgtgttgccgtaagtgtccgcgccgttctcggcgatttcggcggacttgcgggcgatggccagctcctcgttcgtcgggatgacggcgatgatcacggaggagtccggggtggagatgatgcgcggctccttggagcgcttcgcgttcttctcctcgtccagcttgacgccgaacggggcgagcttgtcgcacaccatcttgcgcacgatgtcgtcgttctcgccgacgccggcggtgaaggtgattacgtcgcagccgcccatctggtaggtgtagttgccgatgtagctgacgatgcggtgcacgtacacgtcgagggccagcttggcgtcctcgttgccctcggccaccagacggtgaacctcgcgcaggtcgccgaagccggtcatgcccatcatgccggagcgcttgttgaacagggtgtcgagctcgtccacgttcatgtgggcgttgcggatgaggtggaagaccacggccgggtcgatgtcgccggtgcggccgcccatcatcaggccttcaagcggggtcagacccatggaggtctcgaccggcttgccggaaacctcggcggaggcggaggctccgttgccgatgtgcagcacgatctgcttgaggccttcggccggcttgccgatgacgccggggaccacggaggagatgaactcgtgcgaggtgccgtgggcgccgtaacggcggatgtggtactggtcggcaatctccttgttcagcgcgtaggtgctggccgccttcggcagctggaagaagaaggaggaatcgaacacgaagatctgcggaacgtcgggcagcagcgcgcgcatgacttcggcgcccttggcctccgggccgttgtgcagcggggcgagcacggccaggtccttgacggcgttgatggtcttgtcggtcacgagggccggcttcgggaagagggatccgccctgaaccacacggtgaccgacggcgacgatgcctgcttcggacaggtccggtccgtactccttgaagaagccgagcacgcgcctgaggccctgctcgtggtcgtggatcggctcttcgagctcgtgcttctcgccgttgtactcgtgcttgtagtgaccgtcgaccggttcgccgatcttctcgacgagaccggaggccagaccttcgccggactcaagatcgaccagctgatacttgatagagctggaaccggaattgatgacaaggacggttttcgccattgtgggcatcctccatgattgatacgtaccgcgaaacacggctttccatctgatagattactcgctgcttgctacaaatcagcgccgcaggtttcgccgagagccaccaaagagaaaagccccgctgacgggctgagccgtgaagtaaacagcggggctggttataggtgaagagcgaacgacagattgcacgtgcccccgctggcgggggctgtcgcgaagcgactgggggcggtcgtaaagagcggctgtatcgcgcggagaccgctaaaacacccgcgtcactgggcctcgatggcggtcagtgcgatggtgttgatgatgtcctgcaccgtcgccccgcgtgagaggtcgttgacgggcttgttgaggccctgcagcacggggccgatggcgagcgccccggaggaacgctgcacggccttgtagccgatgttgccggagcacaggtcggggaacacgaacacgttgacgtgtccggccacgtcgttgcccttggccttggtggctgccacgtcgggcgaccatgcggcgtcgaactggatggagccgacgacgggcaggtccggagccttctccttgacgattcgcgtggcctcttcgacgatgtccacgtccggccccttgccggagccgagggtggagtaggagagcatgccgaccttgggctcgatgccgaacgccttggcggtcacggcggactgcagcgcgatctccgcgagctgttcggcgtccgggttgaggttgatggcgcagtcggagaacacggtcacgtggtccttgaagcacatcaggaaggcgccggagacgagcctctgcccgggcttggtcttgatgacctgcagcgccggacgcacggtgtttgcggtggagttgaccgcgccggacaccagaccgtcggcgtaaccgagcacgacgagcatcgtgccgaaatagctcgcgtcggtcagctgcttgcgggcctgctcttcggtcatgcccttcttggcgcgcagctcgcacagcttggcgaccatgggcttgaggatgttctcgtcgtccatggcctggaagcgcgccttgcccagatgggtcagaccgagttccgcgccccgggcgaggatcgcgcccttgtcgcccacgatgatgaggttcgcgatctcgcgctccagcaggtagtcggccgccttgatgatgcggtcctcttcgccttcgggcagcacgatcgttttcttgttcgccttggcgcggccgagcaggctgtactggaaggcgtacgaggtgatcgggaagtcgatctcgacgttgatggcccgcaggacctcttcggtcggcacgttcgcctggaaggcggcgagcgccgcatcggcctgcgacgcctcggtgaacgggatctgggggatcgtccacaccggcagcccgaagtccgcgagcgtgtccttgaccgagacggagtggcgcggctcgcagcccgtcacgaagatgcccagcaccttgttgccggcggcctccatgccttcgatggagagacggacggtgtccttgagctcgtcaggccaacgatcgatggtgcacacggcgaggaagacgccggcctgcaggtcggcggcgatgttcgcgttgaactcgtaggcggtcgggtcgttgacgtgcgacttgtcggtgccgacgatgagcgccgcgtccgcgcgggacacgttcatcgcgtcgttgaacgccgcgacgatgtcgccgcgggagccttccttgtccttgcgcacctggtgaatgtccagtccggtggacagcgcgacgccgaggccggcgttggaggcgttcagcaggatgggggtgaagtggtcgtgattggagaccgcggggcggaacacggtggtcttgaatttggtggtcagcgccttgagcacgccgtatgccacgacgttgcgtccgtttgcgccttcaggacttgcgatgtagatgttcgttgttgtcacgtttgtctcctcgtcggggatggtactgctcgtgtgaccgccttgtttcacacttactgacattgtagtacccgatcgttcgctgccgggcgttgacatgtcggtaaacgcggccgggacggttcgaccgggcgcgtggtgacgatgtagtcgttgcacccgtatccgtccgtcggagacgatgtgctcgatgtcgtgggggtagcctgcgatggggtagtgcaggtagcaggtgatgccgagctggtcgaggcgccgacgataggcgtccgcggccggctgccccgcgtactgggtgagcacgacggagccgacgtggaattcgcacgagcggaagatgtcgatgagtcgcagcacgtcctcgtcgtacgtgatgccgaggtcgccgcgcatcttggccttctcgatgtggttggcgttgatggcgatgacgatctccacgtcgtcggtgaggcttttgagcatgcggaatttggaatccggctcgaagccgggcagcacgcgtgacgcgtgatagtcatcgaacagcttgccgccgaactccagatagagcttgccgccgaactgcgcgatgcgctttcgaatgttggcggcctgcagctcgatatatttctcgttgtcggatccctgtcgcatgtgcagtgagagtcccgtccgaacggagcgctgtacatgcacgattataccgggttctttacgaggaccaccccctcccagtcgcgaagcggctggggtcttacaagaatctacgagtgaaattcggcgatgtgtgcggtagcatggcgcgggaagcgaaagcgtacaagggtacgtcgagcttcccgtaacgcagctaacgcacacatcgtcgaagtccaccggtgaattggaataacgtgtgtggcctctaggcgcaccgaaggaagctgtacaaaggtaccgcgactgaggagcaacgacgaggacactccgttattccaaattcgctcccattcgccctctgaaaccgtgacctaaacgattttgtatagaccgtttagctccgattatcaggattacttagattatccaagaattacggtgtatcataattcctgttgtcattttgttgtcacgctgacaaggatattatacttaattacaccacataaatcaagtggttattgccattctgtatctgtcattgttaattcgccctcagcggtcattctgccaatcgtagcgagtgacaaactttcatcttgggtgagtgaatgcttttcggtaattttcgcttgcgtatcataatacaaacagaaacgatgagaaataacatacacaaaatcaaataagtttgcagactcgtcaagcagttcggtaatccactcagataagtgattttctgcataagaggttggaatttcgggcaaaagtatggcaagtcccatcctcttaaaatttgatcggtactgctgaatttttttcgtctttcttcgtatgctttcttgaaaaaagcgtttctctccgtcggtagttccggaggtagatatcgcaaccttttcatctttaagagggacaaagaaatatccgcttgatttgatgatatttttgcgtttttctatatccttaggtttaccctgatttaattcggaaaaggcgcgagatactttcatatcatcttcttttacagcggcggtaacctcaattcccgtactatttgcactgtcttgaagatcgggagcttcgcctgtaatcattgtatcaaactttgaaggatacaagtaacgcaaagtggcaagcaccctatattcctgagaatgtttaagagtgtttggtttaaccgcagaggaatattttttacctttaactaagtctgtatttatcttcataattattcaaccggaggaataggtggcataacaacaaacattgattttaattcatcaatagtgcctgccttaccccactcagacattccatttttccataccaaactatcagcattgaactgacctgaagtagccatttgttgcaatacatttaaatcaaaaaggtccggttgcttgcccgttcaccgcaatgtgatatgcaacaacaggaacgggtggaggtgttgctccgctcggtgtggtttgattaataccagccattgagttgttcataattccggcaatattatgactgacagcaccgccgagagccattcccgccatcatagcggcaggattaagccctgcgctgccgtttcctaaatcaactccacctgcaccgttttcacccatatgtcccagggcctcagcaccggcaataccgacttcagcctgtttttcaacccgaaacgcaccaatattggcagattgagtttgcttatgcatagcatattgtccctcttcacgctgaatacgtaatcttcctacatagtcagcggtttcggccttaactttagttgtgcatttatgtaattctccgtcataaacggtttttctttgttcttttgcaccattttgcgatgcatctaccgcattaccacaactggcgcagaattttgctccctccgcaagttcttgcccgcagttaatgcaaaaagccatattgcacacctccacagaataatttcaaaacgcaaaaactgtcattttttcaaatgagggcattctagacaagcggatttgttttcatcccataagctacatttcttcctgatcctaccacagaatctcagcgatgcgctggtagaggcgttcaaggaccggctgaagaacgactaaatccgagaaaacaaaaagagctatctgacttttctaacagaaatcagatagctctttattcttgaataatctaaaatgttgtcattttgttgtcacggggcaattccgtaacccaaaagtccagccttttcaaggctttttggcctttcgggcattattcccactcgatcgttgccggcggcttggacgtgcagtcgaggacgacgcggttgatctggcggcactcgttggtgatgcgggtggagatggtggcgagcacgtcgtagggcacgcgcgaccagtcggcggtcatggcgtcctccgagctgaccgggcgcaggacgatgggggagccgtaggtgcgctcgtcgccttggacgcccaccgagtgaacgtcggcgagcagtacgaccgggcactgccagatgtcgcggtcgaggccggcgcgggagagctcttcgcgggcgatggcgtcggcctcgcgcagcaggtcgaggcgttccctggtgatttcgccgatgatgcggatgcccaggcccggaccggggaagggctggcgccagacgatctcgtcaggcaggccgagctcggtgccgatggcgcgcacctcgtccttgaagagggtgcgcagcggttcgatgagctggaacttgatgtccttggggagcccgccgacgttatggtgggacttgatgttggccgcgccgtcgccgccgccggattcgacgacgtcggggtagagggtgccctgcacgaggaacttgacttccttgccgcgggcgccggcctcttcgaggacctgacgctgggctttctcgaaggtgcggatgaacttctcgccgatgatcttgcgcttgcgctcgggctcggagacgcccttgagcgcttcgaggaagtcgtcggcggcgtcgacggtgatcagtcggatgccggtggcggcgacgaagtcgtgcttgacctgctcgacctcgcctttgcgcagcaggccgtggtcgacgaacacgcaggtgagctggtcgccgatggccttgtggacgagggcggcggcgactgcggagtcgacaccgccggacaggccgcagatcacttcggcgtcgccgaccttctcgcggatcttggcgacctggtcctcgatgatggaggaggcgtcccagttgtcgggcaggccggcgcactggtggaggaacgtctcgatgagcttctggccgaggggggtgtgcttgacctcggggtgccactgcacgccgtagagcttgcgggactcgtcctgcatggcggcgacgggcgcgccctcggtgtgggcgagcacttcgaagccggcgggcgcggtcttgacggcgacgccgtggctcatccacgtgtcctgctcggccggggagccggcgagcagcccgtccgtcttgtcgatggtcgtgtcggtcttgccgtattcgccgagcgcggccttgtcgacgtcggcgccgagcgcgtacgccatggcctggaagccgtagcagatgccgagcacgggcacgccggcgtcgaacagcttgggatcgacgcgcggggcgccgggctcgaatacggatgcggggccgcctgacaggatgatggcctgcgggtccttggcgagcatctcgtctaccggcatggaatgggggacaagctccgaatacacgttcgcctcgcgcacgcgacgggcgatgagctgcgcgtattgggcgccgaaatcgacgacaagcaccgggccgttagccatgggactcccttcatgcggccgcgcgcgatagcggatacataggtatgggcgatatcgttgattgcggccattggtattgtgtggacttcttacagtatgtcacatcaattgtggcgattcgagccgacattggcgtgtgtgatgggcgggtgtcgtccgggagcgacgcaccgtttcacaaaaccgaacaattaacgctgttaatatgaacaacacgccgcatgttctgttgcctgcatgaacacgcggcgtgccggtagatcgctgaaatcgttggaaaataagagtttctcattggatggagccgtaatataacctgtgaggacgccggttattcactcataattcatacaattaatctaacattttcgaacacacatgcaaaaaagctgccaaaagtcttgctctcaacgtaccatgatgaacgattgggattgggcaaccgcgaaatcgcaaggcttcgcgagagtccatgaccgaacgataatgatcaattgcacatcactgtgcaggagtacaggagtacacatgacgagtcctgttattggcaccccttggaagaagctgaacgctccggtttccgaggaagctcttgaaggcgtggacaagtactggcgcgttgccaactacctttccatcggccagatctatctgcggagcaacccgctgatgaaggaacccttcacccgtgaagacgtgaagcaccgtctggtggggcactggggcaccacccctggcctgaacttcctcatcggccacatcaaccgcttcatcgctgaccacggccagaacaccgtgttcatcatgggcccgggccacggtggccccgccggtacctcccagtcctacctggacggcacctacaccgagacgtaccccaacattaccaaggatgaggctggcctgcagaagttcttccgccagttctcctacccgggcggcatcccctcccacttcgctccggaaaccccgggctccatccacgagggtggcgagctgggttacgccctgtcccacgcttatggcgcgatcatggacaacccgagcctgttcgttccctgcatcgtcggcgatggtgaggccgagaccggcccgctggccaccggctggcagtccaacaagctcgtgaacccgcgcaccgacggtatcgtgctgccgatcctgcaccttaacggctacaagatcgccaacccgaccatcctgtcgcgcatctccgacgaagagctccacgagttcttccacggcatgggctacgagccctatgagttcgtcgccggcttcgacgatgaggaccacatgtccatccaccgtcgcttcgccgagctgttcgagtccgtgtgggacgagatctgcgacatcaaggccgcggcgaacacggacaacatgcaccgtccgttctacccgatgatcatcttccgcaccccgaagggctggacctgcccgaagtacatcgacggcaagaagaccgagggctcctggcgcgcccaccaggtgccgctggcttccgcccgcgacaccgaggcccacttcgaggtcctcaagaactggctggagtcctacaagccggaagagctgttcgacgccaacggtgccgtcaaggacgacgtcctggccttcatgccgaagggcgagctgcgcatcggcgccaacccgaacgccaacggtggcgtgatccgcagggatctcgtgctgccggcgctcgaggactacgaggtcaaggaagtcaaggagttcggacacggctggggccagctcgaggccacccgtcgtctgggcgtctacacccgcgacatcatcaagaacaacatgcacgacttccgcatcttcggaccggatgagaccgcttccaaccgtctgcaggcttcctacgaggtcaccaacaagcagtgggacgccggctacatctccgacgaggttgacgagcacatgcacgtctccggccaggtcgtcgagcagctgtccgagcaccagatggaaggcttcctcgaggcctacctgctgaccggtcgtcacggcatctggagctcctacgagtcctttgtgcacgtgatcgactccatgctgaaccagcacgccaagtggcttgaggctaccgtccgcgagattccgtggcgcaagccgatcgcctccatgaacctgctggtctcctcgcacgtgtggcgtcaggatcacaacggtttctcgcaccaggacccgggtgtcacctccgtcctgctgaacaagtgcttccacaacgatcacgtcatcggcatctacttcgcgaccgacgcgaacatgctgctggccatcgccgagaagtgctacaagtccaccaacaagatcaacgccatcatcgccggcaagcagccggccgccacctggctgaccctggacgaggctcgtgccgagctcgccaagggtgccgccgcttgggattgggcttccaccgcgaagaccaacgatgaggctcaggtcgtgctcgccgccgccggcgacgtcccgacccaggagatcatggccgcttccgacaagttgaaggccctgggcatcaagttcaaggtcgtcaacgtggctgatctgctctccctgcagtccgccaaggagaacgacgaagcgctgaccgacgaggagttcgccgacatcttcaccgccgacaagccggtgctgttcgcgtaccactcctacgcccacgacgtgcgtggcctgatctacgatcgcccgaaccacgacaacttcaacgtccacggctacgaggaggagggctccaccaccaccccgtacgacatggttcgcgtgaacgagctggatcgctacgagctgaccgccgaagccctgcgcatgatcgacgccgacaagtacgccgacgagatccagaagctggaggacttccgtcaggaagcgttccagttcgcggtcgacaagggctacgaccacccggactacaccgactgggtgtactcgggcgtcaagaccgacaagaagggcgccgtcaccgccaccgccgccaccgctggcgacaacgagtgatgatcgcctgattcttatcaggatctgagctgaaagggcttccggagcaatccgggagccttttttcgtcaggctccaccaagcgacaatatcgctcgtgagaatggtcatcgcctacaaaccgacaagtcgtcatgacacgacgggtaaatccacactacgtagtcatctccatatataatcaagacgtccgctgaatgcgacccaccgcatgacggtccctcgaagaagaaggtgatgactctcttggatgtatcattctcatatttcatccaacaggtatgttcgaatccggcgctggccattaccacgttgctgacgctcggcgtcattttcgtgaacggctggaccgacgcccccaacgccatcgccacctgcgtcaccaccagatgcctacgtatccgtccggcggtgatcatggccgcggtgctcaatttcttcggtgtgttcatcatgacgcagctgaacgcctcggtggcgtccactatcagcaacatggtcgatttcggcggcgacacgaacgccgcgctgatcgcgttgtgcgcggcgctgttctccatcgttgtctacagtgtgggcgcgtcgctgctgggcatccccacgtccgagagccacagcctaatcgccggcctttccggcgccgccatcgccatccaggatggcatcggcggcatcaacatgggggagtgggtcaaagtgctgtatggtctcgcggccagcctcctgctcggatttggtatcggctggatcgtgtgcaagctggtgacgctgatctgcgcggggcttgaccgcaggcgcgccaacgtattcttcaggtatgcgcagatagtcggggccgcggccatgagtttcatgcacggcgcgcaggatggccagaaattcatcggcgtcctgttcctcggcatggcgttctgcagcgggcagaccggtgtcgcaggcgtgatcatcccagtgtggctgatgatcctgtgcagcacgatcatgggtgtcggcaccagcgtgggaggggagcgcatcatcaaatccgtcgggcaggacatggtccggctggagaaataccaaggcttttccgcggacctgtccagtgcgctgtgcctgctggtgatgaccgtgctcggcatccccgtttccaccacgcacaccaagaccagcgccatcatgggcgtcggagcggtgcgcaggctgtccgcgatcaacttcggcgtcgtgcgcgacatgatgctcacctgggtgttcacgttccccggctgcggcatcatcagctacgtcatggcaaaactgttcatgctggtgttctgacaccgctccggcacacggcatcagtcatcgtttcaagaaaggatcagcatatggcgaggaaaaacgattcgttctatttcgacggattcaagcagagcgccgattatgcatgccaggcggcacatctgctgtcggaagtcatgcaccattacgaaccggatcgtctgctggaacgattcgacgagatgcatcgcatcgaacaggcggcggacgaggtccgtcacggcatgatggacgagctggtcaccgcattcatcactccgttcgaccgggacgacatcgcgcggctgagcagcgtgctcgatgacgtcaccgaccgcatcgaaggcgccctgcaccgcatgtattacgacaacgtgctggagatccgacccgatgcgctggacttggtcgacatggtcgagcgctcatgcgggaagatggcggagctgatcggcgagctgccccggttcaagcggtcgaagaccctgcgcgagcaggtgttcttcatcaacaagatcgagcaggacgcggaccgcctgttcgtagaggcgatgcgccgcctgcacaccacctgcaccgacccgctgcaggtgctcgcctggcacgaggtgtacgtgcatctggagctgtgcaccgacgattgcgagcatgtcgccgatgtcgtcgacaacatcgtcatggagaacagctgagagcggttcccccgtcccgtcccggccacggcgttggacgggaatgccgcctaacggtgggtgttgagccacgcgatggcgagctgggtgcggttggtcagagcaagcttgtcgagcatcgcgctgatgcggttgcgcacggtgccctcgctcagatacagtctggcggcgatgtcgcggttgtcgagtccctcggcgacgagcgccgcgatgtcacgctcccgttcgttcagcagctgatcgatgccatcagacgtacgacggccgtgcgggatgccgtcgccggccgtgtccgaggcgtcgtccggccccttgcatccggcaccggccgtcggcccggtgagtttgccgatcacgtcggcgccgagcaccacctgaccggccatcaccgcatgcagggcgggtgcgatcgccgccacatcctgcttgatgagatagccttttgtcccgagccgcatcgcctgctcgatataggcctggtcagagaacgtggtcaggaacaggatacgtgccgccggatccttcgtcaggatctcccgcgcggcgtccagcccgttcatgccgggcatctgtatgtcgatgagcaggatatccggatgattctccggcgactcgaaatacctgcgaatcgccgcgccgccgtcgttggcgctccatagcacgtcggcggtgtcggtggcggtcaggatcgtctccagcgactgacagacgatcgggtcgtcgtccacgatcgcgattctcatagcttccccctgttccctaatgtgccggcagtcgtcttcatgaatgccggctggtctgttttcgcgcaagattccggggatgcatgccaacgttgcttcggcacggacacgaacacgcgccatccgccatcatacgggccgcacagggcggttccgccgattgagcgcacgcgcgattcgatgtcggtgagtcccatgccgcgaggcggctccccgtccgtccggcaccgcccgcgggcatcacgggcgcggatcgcgggccctggatcctggacgaccaactgccacaatgtcggaaaatcacgcagcgtcacgctcgcctcatgggcctcgctatgatgcgcgacgtttgccagcgcctcgcgaatcaccgtcgcgaagcagcgtgacaccggggccggggccgtgtcgacgtcgttcgccaacgacaccgagaagtccggggagataccgtcgaatgaggcgacggcggcttcgatctgcgcggcgaaatcggtgccatcatcctcaaggtcatgtaccgagcggcgcaccatcgtcatcgcatcgtccaaggtctcgcccagcgtggtgaatccacgggccgcgacctcgtcatcggtcgcctcggccacggccctgccggcctgcgcctgcatgatcgcacgagtcagcaggtgccccacattgtcgtggatctcgcgggcgatacgcgtgcgttcgccgagcgtcgccatgcggaccgactgcgcgcgctcctcatcgatatcggcgatgcgcgagcggacggaacgggaggcttcacgggccatatcctgagcgtgcagcagcgcacgtcgattcccatccgaagcctcgcgggaccgtcccgcgacgaatccgagcaacgcggtcaacgtaagagccagcgcctgcatatggctgttggcatctgcggcttcggccgcgacaccggcatgtgacacgcggacgaaccacagcgccgcaaacggcaacacccatagccagcgcacggccgttaccagccgcgaagggcgccctgcggcagccagacgcgccatatcgtaggcgacaagcggcatgaacgagcaccatgcgggcactgccgcggcgacgatcagatacgccacgcaaggcaaccacggccatcgttcatcggcatgcagccattcgaccagtccggtgacggagacggccagcagaagccccgcgatgaacacggcatcggtgcggatcccggtcatcacggcgagcacggtgcccaacgcgagcagaacaccctcctcggccaacacgcgcatggcacctcccggatcgtcattcgtttcaataccagtctagcggtggaaggaactccacgaacatgccgatcgtggcggataatccgcgtggcggctccctgacggtgggtctgttctccaaccgaaccatcaacatcggcatcgtgaccgagatcgtgctgctcgtgctcatcaccgaagtgccggtattgcagaccgtgttccacaccgcgcccctgggctgggacgactgcgtatacctgtgctgcatcccgttcgtgatcctcggcatagaggaactgcgcaaactcatctggcggcattctttcccaaccgagcgggtatagcgtgctccgccccccccgctggcgggggcaagtggcgccgcgagatgatgacaaatgtcacgggtgcgcggccaagtcgtgacgtttgcaggtggcgatcgccgacactctcttgggatgatgtaatcatcaaagaaaggagcggctatggcaaccgacaacacagcccccggacgcgatgtggcacccggcgcagtgccggccgtgcatgtcagtcaactggtcaaacgctacggtgacatggtggcgctcgactatttcgacctcgacgtgacgcaaggcgagatcttcggcctgctcgggccgaacggctccggcaagaccacggcgatcaactgcatcctcgcgctgctcacctacgattcgggcacgatccgcgtattcggccagccgatgacgccgacctcatacgcgctgaagcgccgtatcggcatcgtgccgcagaatgtggccgtgttcaacgaactgaccgtcaccgaaaacatcgactacttctgctcgctgtacgtgccgaagaaaactgaccgcgcgccgctggtcgaggagtccatcgaattcgtcggactccaggacttccgcaagttccggcccggcaaactgtccggcggtctgctgcgacgcctgaacatcgcctgcggcatcgcgcacaagcctgacctgatcttcttcgacgaacccacggtcgctgtcgacccgcaaagccgcaattcgattctggaaggcatccagcggctcaaccaggccggcgccacggtgatttacaccagccactacatggaggaggtcgagcagatctgcgaccgcatcctcatcatggatcacggccgtcatctggcgctcggcaccgccgacgagctcaagaacatgatcgacacgggcgagcgcatcaccatcgaaacgctcgatctgacggattcggcgatggccgaggtccgtgcgctgccgtgcgtgatcgaagccaactacgacggcaaggaactcgacgtgcgatgccgtcgcggcgagcacaacctgaccgacgtgctcgacgctgtcaaacgctccggcgccaacatcggccacctgaccagccatccgccgacactgaacgacgtgttcctcgaactcaccggcaaggcactgagagactgaccatcttgcccctgctggcggggctcccgcgaagcgagtgggggtggccttgcaacaaccaccctcagtcggcttcgccgacagctcccgccagcgggagcaggtaaggagacatcatgtggaccacatttttggtcgcattgaaagcgaacctgcgcaatcgtcaggcactgttctggatgattgtgtttccgatcgtgctggcaaccatgttcaacgggttcttcggcggactgtccgagggatacgagctcaaaccgataccaatggccgtcgtcgaagatagccgctggcagcaggcggacggagcgcgtacgtttgtggatgccttgtctggagagacggcctcatcgtcggagtctttggacggcacggcatacgccgatatcaatcagcaattgctgaccatcaccgcagccgacaccgtgcggaaagccgaacagctgctcgccgatggcacagtccgcggctacctggctgctgacgacaacgggcgtttggcgataaccatcagtcgggaaacggtgaccgcggccaatgacaccacaggaagcgtcggactggatatcagcctatcggcattgcgcagcgccatcgacctgtacaaccgcaccgacgccgtcacccgacaaaccatcgccgacaatccacaggctgcgctcagccgcaacttctggaatagcatcgggcaaagcgtcgatgtgactcacgaaacaacgctcacgcatttccagcccaatgccatcgccagatactattacgcgttgctggccatgtcctgcatgattgccatggggtactcaatcagcacggtctccacagcacaagccaacctgtccgcattgggcattcgccgcaccgtggcgccattgagccatgccagacagcttattgccggtttccttgcctgctggttgtgcgcatcggtcgcattgcttatcgcattggcctatattcgcttcatctgcgacatttcgtttggagggcgagaaccggtgacggtggtcgcggtaatcatcgccgcattcatgaccagttcagccggtactttgctcggcgcggtaccgaagctttcctacgacacgaaatacggtttgtcgagcggaatcgcctgcacattgtcgctgttcaccggactgtacggcggcttcgccatgcagatcagtgactggatagcacgcaacgcgcccatcctcggcaccatcaaccccgcgcaacaggtgacgaacctgttttacgacattttgtactacgacagctaccagccgttcatcaccacttgtgccattttgctggcgatgagcgcggtattcctcttggccggcatcgcaatgctgaggaggcaacgctatgaacacctgtaaagccacattgcgtgtactgttctcgcacagggcctacctgttgatttacctcgtgttcgtgggcatcatgatgctgtctatcagctggtcgatgctgtctggcacatccgattccgcagccgcggcattcgagccggccaaaatgcgtgtcgccgtcatcgatcgagactcggacaggggcggcatcgcgtcatcgatgcgcacatacctgtcggattccagcgaactggtgaacgttgacgatgctagtgaaactctgcaacaagccgtcgcctcgaactgggtggatctgatcgtcatcatccccgatggtttcgccgacgatttcattgatgccgcggcgacaggcgagaatccaccaagcgtggacacggtcaccagctatacgtccggcgcaggctcgatggcccggatgaacgtcatcgggttcctttcactcacgcgtacggcactgattggctcgcatacgacggtcgatagtgcggcgctcgcagctatggccggtatcgacattggagacactgcgggtgattcgtctgaagatggcatgggcgggtttggtgaattctcgaatcaggacatgcttgatatgctgccggccggtcagattgagaaacccagcgtcggcgatctgttcgaggcatcgaaagcggctgccgcatcggcgagtgacatggacgcgaaccataaggtcgctgtgatcgacacggcgagcgcggacgcggaaagtgcttcggacatggcggccagcagatttggcaacaccatgaaaaccgcgctgtatccgctgtttttgacgatgaccgtctgcgggtcaatgattctgggcatattcaccaccggggaagttcgccgtcgtctcaccgcatccccacaacgcatgtcgtcgatgggactccagcggttgctgacgctcagcggattcgcgctcgtcgtatgcgtcggttatctggtgctggcggtcggtctgatggtcgcggcaggacttgatccgttgacattgagcgccgaaggagtgctgatgacgttctgcgcaacctgcgtatatgcgctgatgaccgtcgcctgtggattcatgctcagcgaattcgggttttcggaggcggctgccaacggattcgccaatatcttcggcctgctcatcatgttcacgtcgggcgtcgcattgccggttgacatgatgcccggcgtgatggtgaccatagccaagttcctgcccggctggtggtattgcaccgcgatcgacaacgcgctcggctccggcacggcggaggaaaccggcataagcgtcgccggctgggccggctcgctgggattggtcgcactgttcggcgtgatgttcatctgcatcggcctggccgccggccgcttccgccgatcccgtcccaccctggccgcgcccgccaccacgcagctggccgagtgagaaatcagcctttcaaccgataccgctgtaccgagtcgtcggcgaacttgactcgggcgacccgcccttccttcatcagctcgcgcataccggatgtggcggccagcggcgtcaactgcagttcgcgcatgatctccttgacgctcatcgccgaatgccgctccagtacggtcataatcgccttgaccacgtcgcccggcgaactgttcgccatcgtgcgttgcttggtgatggtcatcgtgaacgtgttgatgtcgttgcgcgtggtcgccggctcgatgccggcctcgcgcaacgcggcggcgatgcgctggtagccgtcgccgccttctgggttcacaaacccgccgcccggatacggcgtggactccagcagcgtgaacaggaactggtttcgggtggagacgaacggcgcgcccgtcaccggatgcggactcgccagcacatcatgtgtcaccatgccgtacaggccacccggattggtgatctcgatgcgatcggtgaacacgctgatatgcacctgcgtgccgcgcgcatcgggcgaataatcacggtgggtgagcgcgttcgcaatcgcctcgcgcaacacgagtggcggataatcgggcttcttcgcgccaatccaacgcatcagcgagtcgaccgcatcgtcgatcatcaccggaatcgaaccgaccaccgacttcgaggcgaccaatcgttcgtcgccccggaacacatcgtcccggctcgtccccggaaacacggctatcgaaatgccgagccgcggatagaacttctgcggatagcggcccaacgccagcagtccggccaaggtgggacgcagtattccgccgacctccgactcgtcggaatcatcatggcgcaacacctgcagatccagcagcacatcgatgccgtcccggtcggcgaacacgcgcggatgctgttcgcgcacgcgtgccaacaatccggcaacaagctgcgggtcgaggtcatcggtcgtggcgccgggcacgatatccagatcgtaggtgggctgcagatgctcctcgataagacggtcgacttcatacgaggtcatgcggcgatcgccgtcgccggtgcggatgaacgatccgccatgaggccccagggccgtggtgaagcagggcttatcgcgcggcagcatttcgtcgatgcgcgcgaacaccagattcgcgccttcgaacgggcaggtgacgatcacgggccgcaccaccggcgtcatcttctcgcacgcctggctcagcgcctcctgcatggcgcgcgcgtcgaatccttcgaccggcgtgaacccgttcttctcggagagccccagtatgatccaacctccggagccgttggagaacgcggacagcgtatcggtgatggtcgaggagatcttgcgcttgcattccttgacctcgcactgctgcgtatcgttgccgatcatgcgcatcagctcgatcagctcggtcatcttcgcggtgtagtcgtcaaccatggcggtcctccttgacaccattgtcccgcggccggctgtctgccgaagcctcccgcgcccacgtcctccgtcaattcattgaaaattcacgcggttggggtgcgcataagactgttgttttcattggtgcagtacgaggtcccgttgtctatttgtaagtgcaacgccttcgtcagagttgtaagtctggcagttcgtcggcaaacgcctcggcgggtgtgcggtagccgagcgctcgcatgggccggttgtcggtctcgtcgacgatctcctggagttccctcgccatgcccggttcgatgatcgtgcgtttgggcaggtaacggcggatcatgccgttgcggttcttgttgctgccccgctgccagctggaataggggtcggcgaagcacgtggccatgcccggctcgtcgcgcagccgcgcgtggcgggcgaactcggtgccgttgtcgtgcgtgacgctgagcctggcggccgccggcagcggggcgaacatcgccagctgcgccccgacgctccgctcggcggtcttgtcggggataacacgggccatgaggaagcgggtcctcctttcggcctcggtgtgcaggttgcatcccatgccgatgacgctgtcggcctcccaatggccgaacccgctgcggtcgtccgcctccggcggacgctcggcgatggagactcttccggggatagggaacctcgacacccgacggcccgcatgcttgcgccgccgccggtggccgcgcggcaggcatcgggcccggcgttcgcggcgcggcttgctggaatggatccatcggtagacggtctccgggcacacgcgcatggcatcgtcgccggggaacaggacgcgcagcctgccgctgacgggcggcggcgaccagccgcagcccagcctctccgccacccacgcccacagccggtcatgcgacaggcgatgcggcttgcgcgctttggcgcgcctccgggcggccttgcgctgggccggcccggcgatgtaatagcggctcgtccaaggcccggtcttgagccgcttgggccgatagggacggtaggattcgctctcgttggacgggaaccacgtgttgcgtttgatctcacggctgacggtggacgggctgcgcccgatcatcgtgccgatcgcccgtatgccggtcccgttgccgatctcgatctggatgacctggcgttcctcttccgacaggtgcgaatatacttcccccataggtgcaacatcccttccggactggttttctagacaatctccaatctaacggggtgttgcactttcatttagacaacggggcgtttgtcaagcaaccggtaggggagatacaattatcttgtagcgttgatcgattccaaggagggaattatgagctatatgaaaaagattgcttcaacgctcgcggcggcagtcgcgtccgttgcttttgcccttgttccaagcgttgcactggccaatggcaccgatagcgttccctatgaggcgaacgccaccgttgtcgttgcccccaacgctcctgaagggtcagagttgatctttgaccttgagacgaagacgttcactgacattgttctcccgaacggacgcacgcttaaaccaagccgtggttgcaccaacaatacttccgcttgctgggcaggcggcggagcgctcggcgacatggagtttacgggtactggcgcggttaatggcaattggcccagccggagcagcttctactccaataacaagtcagcggacatcggtttcacctggaaaggagaacgggtgtacgtaagccagattgctgcaaaccgcatattcacgccaaacggctctgtcgacggcttctacgtcacccgttactaaaacctatgggagagcacatcctttccctacaacacctttagacggagggccggtgtcttcgggcaccggccctccgcgttcctagcggctgtgccggtgatgtggctgcggaatcggttcgtgtgttgtctttgctttttcgatgttctcagccagtctttgtttgattcgttcgttgaagcggctgcggttgagtctgcgcacgcgatcctcgtagggtttacgcatgtggtcgagcgtggccttggatgcgttggtgcggaaggcgttggcctcggcgtaggtagccgggatggtcgtgttctcaagccacggcgccgtttgcttcagaagctgggattgctcggcggcggtcctctcggccgcgtgtcggagccatccgcgcgtgaacgggttcgcgtgctcggccttttcgctggcctcgcgcgccacgtcgatgatccgttgcacgtccctgacttcccgtggaggctcggtcttccaccgttcggtgaggtcggcgagctcacgcctggcctcgtccagttcgtccaccggttccggctcgggacgccgcggttcgcgtccgatctcccgcggcacgggatcaggcttggattccaagctcctgccggacgtgctcctggggggggggcgtgggcgcttcgaccagttgccggccacgcgacgctatgggctggcgatcgaacacagtgattcccggaaccggctcatcgccgtgtcgagttccttcctggcctgctccttgaattgtccgagcaggccggtcgggtcgcccatctgtttgcggatggccgtcaggtaccggttggccgtggcgatgcgccggttgatcgcattgaggatgctgtgcccacctcgtttggtgatctcgcggctggcgtggccctcgtggatggtggggatacgttcgatgccctgcgcctcaaggctgcggtggtcgatgcgcacgccctcgggcagcatgaggttgcactgtttggcccagtcggcgcgcagccgttcgaggaattccgtggagtccaaggggttgttcgacacgtccacgcgcttccagaccttacggttcttggccccggtcttctgctcgccggtggcggggtctatgaccggtatccgctcgccgttctggtgatatgaactgatttttgttccgcatttcctctgactcgatgggggatgatggaaccatggcaaagggcactcgatatacgccggagttcaaggcgaaggcggtcaggctgctggcggaatcgcgttcctcgtattcgtcggagacgaacgcgatctccgcggtggcgaaggatctggggatagcgccggaatcgctgcggcgttggcgcaaccagtcggacgcgacggtcgcggaggagacgaggcagtcggccgaggacgcgatggcggagctgaagaagctgcgggccgagaacgcgcaattgcgtcgggcgaacgagatcttgacgacggcgtcggcttttttcgcggccaggctcgacccggcacggcgttgatggccgcgtacgtcgacgagcacagaagccgtttcagggtcgggccgatctgcagggtcctttccgaatcgttgggctgcgggtttctcgcgccgcgcggctgccgcatgttcagaacacgtcccgtcagccgcatgcgggcggggcgtgaggcgctggcccgcgccgtcctccagatccgctcggatttcttcatggccgtgtacggctgcgggaagatgcacgcgcagctggtcgcccagggctgggatccggccggggtcggccgcgaccgggtgatgaacatcatgcgcgggcttggcatccggggcgtgcgccgcggcagaaccccggtgacgacgaaacccgccaagggcacgggcggcaggccggatctggtggacgggaggttcgaggcttgtgcgccgaaccgcctgcacgtggccggcatcacctacgtgcgcatggccaacggctcgttcggctgcacggcgttcgccgacggcgtgtacgcccgtcggatcgtgggatgggcgtgcgccatgaccatgaacacgcaggagctgccgttgcaggcgttggggcaggcgatctcatgggccgcgtcccgcggcggcgcggatggtcttatccgccacggcgaccatggcacgcagtgcaccggcacggtgtacaccaccggggttatggaatatgggatgctgccgtcgaccggcaccgtcggcgactcgtgtgacaacgccatggccgaaagcgccgacggcgcgtacaggaccgagctggtatggcggcgcagacccttcgcggatctgaaggacctggaattggcgacgttccggtgggtctcgtggtggaactcgaagcgcctgcaccagtccctggggtacaggacacccgaagcggtggaaaccgagtatcatcaacatcaagcggcacaagccgccccactataaggacggaacaaaaatcaggccacttcacattgcatgccttgagggtaatggggacttccgctcacccgagtgcgtggagttgctggacgaagcggacatcgtggtcactaacccaccgtttagcctcttccgtgagtacattgctcaactcatggagcatgataagaagttcgtcgtcatcggcaatcagaacgctgttacctataaggaagtgttcccactcatcaaagagaaccgaatctggcttggctgctactcggggaacatggagtttcgggtgccgggcgattatgaggctcacagcgagaatgacaagtgattctggacggacgaatcggggcagaactggcgaagcatcggcgctgcctcgtggttcacgaatctggacatcagaaaacgtcacgacgaacttatcctcgtgaaacgctataagcccgaggattaccccaagtacgacaattacgacgcaatcaacgtgatttgcctgatggaggaatcacggcggctgcgggaagcccgttcgtattccagcaagtctgtcaggcggattctgcgatgacgtgatgggcgggaaaaaggaatgagtcctttatctaacattctgactagcgtctgtcgcgatactcccagtgtgcgcggcttgttccgtcgtgagttcttgttccgtggcgctgatcgtcacgctcttcccctcggagagcagtatggccgtctgttgaaccgcatcgcgaagctgcttcggcagcgccaatgagtagcattcttccagcttggcttgatacattgcgtacgtgaccataaggccacaacggccaaatgaatcgggagcatcatgggtgattacaacgaacacataccggacggcgccggcgacaacggcgacgccgacgagctggtgtaccaatccgagggctgcggcaaggccgcgcattgcccactgaaacgactcggcaagggcgacaccgcggtcaacatcatcggtgtgaccgtctcggccgtcatcgtcgcggcgagcatctacgcgcaatacgcgctgaccaaatgggccgtcaaatccgcgctcaaggaaacacgaccgcacgattgatccggtgataccactacaccgacttgcctttgacatgcgccccgtcgtgtggcctccctttcataccgggaggccacacgacgaaagctcagcgagcctccgccaatatgatgccggcatcggccatctgtttgcgggccgcgacacccaactcctcgctgaccggaacggtcagatcctcgaacacggtgacatcgaagccgagacgtttcgcgtcaagcgcggtgtccttgacgcaatgcgattcggcgatgcccaccacatccacctgcgtgacgcctgcggccttcagcgcattggccagcgtcttgccggcggactgttcggccgtgacctcctcgcgcgtctggatacggtcggtattgtcttcgatgccttcaaaaccggagtatgccgccgaatactggcccttcttgaaatgatgagcgatgcccagagccgcgatggccggatgaagctcggcgttcggcgtgcccgccgcgccatgcttgggccacgtatccacgaaatccggattgcccgaccagtgtgcgcccggctcgatatgccaatcctgcgtggtagcggtatacgcatactcgccgcgatgcgcgttcacatagtcggcgatcctcccggcgaccgcgttgccgccttcgacccccagctcgccgccttcgcagaatgtcggctgcacatccaccacaatcagcgccttggccatgtcatgctcccatcatcgtccgattcgactgacgtttcccatcataagcgaccgatgccaaccgcataagcccctataaacggcgcgcctgacagccggatcgggactcaccggggcagctcattgtcatcgtatcggggcacggcggttctggtttccgcctccgccttcgccttgctcttggcgtacatcagctgacatgcccagacgacggcgagcacaacggaaaatgcgagtcccgataccacgtcaccgtatttgacagcggtgaatatcggcatggcgacggccgcgacgatgcagaagggcaacgcgatccatgtcctgcgcagtttggcccggtaactcgaatcccaatagccgaacggacggctgcccctgtttcccataagcgttcctccggtcatcacgaatttgcgattgcgtcgatgcctacgatgatacggcacccggcgaatcgttatctttctaccgtcactgccgaagtcggctgatcattccatcgctaagctgtaatgatgggattcaatcggcaataggccgatatggaatctttgctgatgattgcattgcacggggcagtattgggcataccatttcgagtgttgagccacggtgattcactgtgggtacgcgcactaagctggttcccggtttgccctcccagagccgtacatacatcattgatgatgctccgctctgcgtcatccaacgcgatatattgattcttcccctgtagaacgattgaatgatgcgcttcgccgatatgacgatgtggaacggcgcatcgaggatatttcagcaaagtcgggttatggaagcgatctcatatatgacaatgccgtgccggtgtatgcccggaatgctgaacagcttgagatgacttattattcgtacttgtcctacatggcggattgcgatgttggcggcttggtggcgtctgggctaagctttgagaccatgtgcggaatcgtcggatatgcaggtaatgtttcggccacgtgcggcaagccccctcaggtgtgtcttcagggattgcaacgcctggaataccgcgggtacgactctgcgggagtggcgctcgtcgcttcgggcatggggcatgcagtggtgcgcaagaaggccggaaggctcgccaatctcgtcgaaagcgtggaacgtaacccgatgccgcccgcgacggccgccaccggacacaccagctgggccacgaacggggcgccctccgacgtgaacgcccatccccaccccccccgcgtacgctggtcgtggcgatatcgcagtccggagagactatggacacgctgatggccctgcgccacgtgtgcgagcagggatccatggtgctgtcgatctgcaacacgcaggtggcgtcgataccgcgcgaatccgatgccgtcagatcatcgactcgctcaagggcatgccggccaagatccaatgggtgctcgacacgcaggcaggcacggcccgatagcgctggtcgatgagggagagctggtggtgttcatcatgccgctcgagcgcggccgtgacgtgctgcacgccaaggtgcggtccggcatcgaggaggtcaagagcagaggcgcgttcatcatcgccgtcgccgaacagggcgaccgggatgatgaacgttatgcggatgtcatgttccggcgtcccgaatgcccgacgttgatgagcccgctcgtcgacgtggtcccattgcagctgttcgccatggatatggccgagatcaaggggtatgacgtggacaagccgcgcaatctcgccagatccgtcacggttgagtgacgcgatggcgaaggacgagagatgacgaagaacgagagatgacgaacaacaaagacaagtggctgcgcgcattgcaggccaaggggatccgcacgacgcaggatgaggtcgggcgtgccggcaggcaccgtcatgacgacccggaggcaaacccgccgaaagatcgggccggttttcgcccggtgaggggaagatccgccaaaccgttcaaggcgaccggtcacaagggcggaatcagccggcaaggtgcatgacgcggaatgtttcggcgaggtcgtgatttgattgccaatgaccatctccagtcgcttcgcgactggagatggcagatgctctgcagcttagtttttttagtcctcgttcttggcgggggcggagaggaatcgttcttcgccgggcagcacggcgttgaggatcacggccaccacgaaagccacggcgatgcagttcgaggcaaagatctggcggaacagggccgggaactgcgcgaagatgtcgctcacctgcgtgaagccgatgccgatggtcaggctcaacgcggcgatggtgatgttgcgctgggtgaagccggcttcggcgatcatctggaatccggaaagaatgatgttgccgaacatcatgatcgtgcagccgccgagcaccgcttgcggcagcgagttgaacacctccgccacggcaggcacgaagctcgccagaatcaggatcagtccgccggacaggatcaccttgcggttgacgaccttcgtcatcgccaccagtccgatgttctgggcgaaactggtcagcggcaggcatccgaacagtccggagaccgaggagatcaggccgtcgccggcgatcgctccggccgtctcacgctcggtcggcgtacggttcagacccaccttggtcagcgcggcggtgtctcccagaacctcgacggacgagaccacgtacagcagtccgatggagatgatcgcgccccaatcgaactcgggcttgaacggcatgaactgcggcagcgaaacgacggaaagctcctggaacccggaaaaatcgaccttgcccatgcaaatcgccaccacatagccgaccaccaggccgaacagcacggacagctgtttggcggtgcccttcatcagcaattggaacgccagacaggcgaccagcgaaatgagacccagcgtcaggttctgccaggatccgaagtccgcggcggacgcgtcaccgccgccgaaactcgtggcgcccacggtcagcagcgagaagccgatggacgtcaccacgatggcggagacgatcggaggcacgaaacggcgccagtaccgggcggtcaggcccagcaccagctcaagcagaccgccgacgatcaccgcgccgaccacggctccgtaacccttgtcggcgcagatcgcggccgcggcggccacataggtgaacgagatgcccgtcaccatcggcagccgcgagccgatcagccacgcgccatacaactgcaggcaggtgccgagacccgccaccagcagacccgactgaatcacggccgccgattgcgcggacgtcatcttcgccgcgttggcgacgatgaatatcggggctagattggcgacgaacatcgccatcacatgctgcaggccgaacggaatgcccttccagaacgacacgggcgcgtccagcgaggacagcgcctcgaacgatacggaattcttcgttttcttctgcgacatggtttccttttctctcctctgctctctgctgttccggactcagtccctgaacgtgatctcgccggtctcgggattcatggactcgacgatggacagcgaatccacgtcatagccctgcgcgcgcagtttgtcaccgccgccctggaaccccttctcgaccgcgatgccgattccctcgacactcgcccccgccgcatggcacagctcgatgagcccgtgcaacgccttgccgttcgccaggaaatcatcgatgagcagcacgtggtcgtcggcgtccaaatacttcttggacacgatgacgggaaactccttgcgcttggtgaacgagtacaccgtggtggtgtactggtcgccgtcgaggttgatggattgggccttcttggcgaacaccaccggaacatcgccgaagtggcgcgcggcgcaacaggcgatgccaatgcccgatgcctcgatggtcaggatcttggtgatggtcttgccggcgaaatgccgggcccactcctgccccatatggtcgaacagacgcacgtcgcactgatggttcaagaacgcgtccaccttgagcacgtcaccggtcttgaccgttccatcacgccgaatgcgctcttccagctccttcataagtcccctttgcctgtaccgtcaatgaataggacagagggacagcatacgccatgcagatgaccgcggcgacctgtatgaatccgccacgagtccttgacgaacactttgtgattccaaaatgtttttttgggagggggatgctctagcataacctcgacggaacgggaagtcgtgtaaggagtgtcagcatgcgcaatgaccgctatgagagcctggacggcatcaagggattcgccctgatcggcatcatctggtatcacctgtcgcaacgctcgctgcccggcggtttcattggcgtggacgtgttcttcaccgtatccggcttcctgctcgccctgagcgtccttcgtgagatcgaccgtaccggcagactgcgtcttggcaatttctatctgcgcaggttgtctcgactgtggccggcgatggcgttcatgatcgccggctcggtgtcgctcggcctgttcgtcaaccatgacattctggtgggtgtgccgggcaaaagcgtctccgcgctgacattcacgtcgaattggggggagatcttctccggagacagctatttcgcggcgacgtcgccgcaattgctgcggcacttatggttcgtggcgctgctggcccaagcgacgctggtgctgccgcttttgacggccatgctgcacagaatcggctccacgttcgtgcagtcgttggtgccggtgctgctcgccgcgctgtccgcgtgtggcatgtgggtgctgtacaacccgtccgccgaccccacacgcgtgtatttcggcacggacacgcactgttttggcatgctgttgggtgtcgcgctggcgttcgtcgtgcggcacagcgaggagtctgacgccgagccgcgccgcctgttcaccatggttatgccctggctggccactggcgcactggtcgtgttgatcatgatgatgccgcgcgtcgggcaggatgcgtcagcgttccgcggcggtctgattctggcctctgtgctcaccgtagtgctgatcggcggcagcatttccaaggattcatggatgatcggcctgttcggctggcgtccgctcgcgctgctgggcaaatactcgtatggcatgtacctgtggcattggccgttgtacctgctgctgcagctcatgcttcccggttatcgtggcagcggattgtgggtggtccaggcgctcacgttgctgctgagcctcgtgatgaccgcggtgtcatggtggatggtggagaatccggtcgcggaatggatcaagtccaagcgcgacaagtcggctccccgccgcacggtggcgcaacgttcggctccgcgacgggtcggcagcgcgcgggcacgtggcgtgtatgggacgcacctcaacaacgtcgagttcactcagccgtactctcaggctgcgcccctgccctcgccgcaagacgcgccggtcgtcgcatcccgcagctcccgtaccgcgaagacgatgcgcatggtcgtcaccgtgtcggttgtggtactgatcgtcatcgggttcttcatgggtgtggcccaggccccggcgaagacgcagacacagatcatgctggagaagaaccagagcgcgctcgccaagaaggaacgtcagcgcaagatggacgccaaggccgcggccgaggcgaagaaacgcgccgaggaggagcgcaagcgccgcgaggaggccaaggcagccatcgagaagaccctgaacggcgaggacgtctccgtgatcggcgactccgtcaccgtgggcgcgtcggcggcattgcagaagtcactgcccggcatcgccgtggacgcccaggtgtcgcggtccatcctgaccgcgcccggtatcgtcgcgcagatgaaggcggaaggccgtctgcgcaagtacgtggtgatctcgctgaacacgaacagcgcgaccacggtcggcgaatacgagcggattgcggccgcggcgggtgatgggcatgtgctggtcatcattaatgcgtatggcgaccgcgagtggattcccgtggccaatcaggcggcctccgactatgtgcgcaagcatcccaccgattcgattctggtcgactggaacagtgctatcgcggcacacaccgattggctcggaccggacggcatccacccgcaggccggacaaggcgaagacctgtatgcctccggtctgaggaacgcgttggcggaatgggaggtcgcccatatcgagtgacactgaccgaaccatgtggtaaacaggaaagccgaatcatcgtcaaccgtcagggggagcagcgtgcagcaggatccggatctcatcgcaagaagcgccgaggaactcgtcggcgacctcaacccgcagcaagccgaggcggtgcagtaccgggggcccgcactgctgatcggcgccggcgcaggatccggcaagacacgcgtgctcacccggcgcatcgcgtggatcctcacgcaattcggagcatggccgagccagatcctcgccatcaccttcaccaacaaggcggccgctgaaatgcgcgaacgcctcgaaggtctgatcggaccggtcgcccagcgcatgtgggtgtcgacgttccattccgcatgcgtgcgcatcctcaggcgtgacggccagtcgatagggctggcgtcgggcttctccatctatgacaccgccgactgcgagcgcctcgtcaagctgatcggcgccgatctcaacatcgacctcaagcgctacacgccgcgcgcgatcctctcgcgcatctccgactacaagaactcactgatcggctggcaggagcagctcaagcgctacgcgcccgactaccggcccggccagcgcggttatcagatcggcaatttcggcgacatcgaggtgctgtattccgtcatctacgccgaataccagcatcgtctggccatggcgaacgccgtcgacttcgacgatctgatcggccggacggtcgaactgctgcgcacccaaccgcaggtggccgactattaccgtcataagttccgttatatcctcgtcgacgaataccaggacacgaaccatgcccaatacgagctgatccgcgagctggcgggcgtggacgcggccgggcaggtcgtgccggacgccccctcggcggggcgggccggcccggcatggatcaccgtcgtcggcgactccgaccagtcgatctatgcgttccgcggcgcggacatccgcaacatccaggatttcgagcaggatttccccaacgcgaagaccatcatgctcgaacagaactaccgttccacgcagaccatcctcgacgcggccaacgcggtcatcgccaacaaccagggtcgcaagcccaagaagctgtggaccgcattgggcatcggggacccgatcgtcggctatgccgcggacaacgccgagcaggaggccgcgtggatagcgggggagatcgctcgcgtccgcgccgaggagggcacgccgtattcggacatggccatcatgtaccgtgccaacgcgcagtcgcgtgcgcttgaaggcgcgctcgtgcatgccggactgccgtatcagctggtcggcggcacgcggttctacgagcggcgggaggtcaaggacgccatcgcgtatctgcaggccatcgtcaatccggccgacaacgtcaacatgcggcgcatcctcaacgtgcccaagcgcggtctcggacctcgtgccgaatcgatcatcgtctcatatgccgatgctcatgcgaccacgttctgggacggcattgaccatcttgaccagatcgacggcgtgcccacccgcaccggcaagcagctcgccgcattcagggacctgatgcgctccctgagcgcgttcgcggccgaacatgacggcaagccgtccgaagtggtgggggaggtgctctcgcagtccggtctgctcgaagaactgcagcggtccgaggatccacaggatgcctcccgcgtggagaacctgtcccagttgcagtccgtcgccgccgaattcgagcagaacacgccggacgccacactcgcgggattcctggagaccacggcgctggtggcggactccgaccagctgccctccgagggcgaggactccggcaaggtcacgctgatgactctgcacaccgccaagggcctggaataccccgtcgtgttcctcaccggcatggagcagggcacgttcccgcactcgcgggcgatggaggacgccgacgagctttccgaggagcgtcgtctggcatatgtgggcatcacgcgtgccaagcgtcgtttgtacgtcacccgtgccgccgtgcgcgcgcagtgggggcaggccaacgagatgatgcccagccagttcctcgatgagatccccgaccggctcatcgactggaaacggcgcgaaaccggcatggagggcatgcgctccggctggtcacgccgcggcttcgacgacgagttcggcggatgggacgatgacgacttcggcggcaccacatacggcgggtcgtcctcgtacggtggttcctcatcatacggctctcgtggacgttcctcgtacggtggttcctcgtcgttcggctccggttcgcgcggcggatcgggctcgtcatatggcggggccaggggattcggctcatcttcgcgccacggcggctccggccgtcagggctccggacagcagtacgggtcgggcagccggttcggctcatccacgggattgtcgcgtggcggcaaggtcacgacgcgccgcaccgctcccaagtcatctctctcgtcggccaaaccggcctcgtcgctcagcaaggacaataacctcaacatcgccgacttccatgccggtgacaaggtcacgcatgaccagtacgggctgggcaccgtcgtcgacacgcaggacaagggccgcaactccgtaatcacggtcgatttcggctcgtcgggcgtcaagcggctgatgctgcgcgtggcgccgctggagaagctctgaggtaaccacccaccggcggcttcgcgccacctcccgccagcgggaggatggtggtgggaccgtaccggcggatgaccggcgtatatatgaaaagcgttgaaaagtcaaggcttgtgtttcccggaaacggttgacataatcgtcgatgtccatcttcaaccgagaggagacaacaatgttccgtagactattcgcatcgctgccggccatcgtgttcggcgtgcttatcgccgtcgccccgcaggcattcgcccatgtgtgcgaggtcaaggataatatgcccatggcgtgccattacaccgcgcaagcggagcttggcatcggcgtggtcatcgccctgcttggtatcatcgctttgttctgcagcccgaagatacgtacaggtctcaatatcgccgtcgctttgaacgcactgctgtcgctggccgtgccgacggtgctgatcggcgtgtgcaagggcgccatgatgcattgccatatggtcaccaggccgacgctcatcgtgatcggcattctggcactgctgttcgccgtcgtcgccatctaccttgactccaagcccgtcaagcgatgatcacacgaatcaccctcaaacgactgccactggagaacctgaagcgcaagccgtttcgcacggctgcgctcgtcatcgtcgtcatgatgctgacgctcgcgttctttggcggctcgctgctgtccatgaacctgcgcaacggattgcgcagcatgcaggaacgcatgggagccgacctcatggtggtgccgcaggataccggcgccaaagccgaggccctgctcactaacggcggatccaacacgttctatttcaccaacgacatcgagaacctggtctccaaggccgatggcatctcccgagtcacggcccagacgtacatatcatcgctcgcggccgcatgctgcgacgagaaggtgcagatcataggcttcaaccccgcgaccgacttcgtcatcaccccctggatcacatcgcagttcgacgggacgctgaaagacggagaagtcgtagccggctcgaacatcagcgtatccggcaacaacacgatcaagctgtacgggcatgagttcccggtcgccgcccagctcggctcgaccggcaccagcctggacaattcggtgttcgtcaatatgtccaccatcccctcgatcgtctcgtactcgtcgtcggtgggacacgcggccatccccgccgaatacgccgacaaggcggtctccgcgatcctcatcaaggtcaaggacgggtatgacgccaagcaggtctcgctcaacatcaccaaggaatccggtctcgaagggctcggattcgtgtatccgggcggcgtgacagccactaccaagaccaacctcgacgcgctggtcgggtacgtcacgctgttcgtcgcagtgttctggatcatgggcctcatcgtgctgctggcagtgttcgcatccgcgatgaacgagcggaagaaggaattcgcggcctaccgcatcatgggcgccacgcgcggcacactgattgcgctcatcgtcaaggaatcggcgctgatcggactggtcggtggcgtcatcggcatcgcgggcgcgtctctggcggtgttcccgttcaacacgctgatcagcaggcagctgcagctgccatacctgcagaccgacgcgctcaaggtcgtcgcgctcgtcgccataagcctcgtgttcgccgtcgcgaccggactgctggcgtcaatcgtcaccgcggtcaagctgtccgcgcccgaaacctatctcacgttgcgcgagggggagtgattcatcatggcgatgcttgaaatcaatgatctgacccgtgaattcacccggcgcggcgcgcgtttcgccgccgtcgaccacgtgagcttctccatggaccagggcgaactggtcgccatcatcggacgttccggcaacggcaaaagcacgctgctcaatctgatcgctggcctgctcaagccgacgtccggcaccgtcgagatcgacggccgaaacgtctccaagctgtcggacaaggagctctcgcagctgcgcaacgcgacgctcgggttcgtcacgcagggacagacgctgctcggcaacctcaccgtgctcgacaacgtcattcttccggccgtgctgtttggcccggcgaagaaaacggtggtgccggatgatgttgcggcgcccggcgaagccgatgccgccggcgcggccgattccgcacgtgagcaggacgatgccgacatgcccgacgtcatcgacgatgatctcacggcggagcacgagcccgacgccctggagcgacgggcgacgatgctgctggatcgactcggcgtggctgacctgtccgacagctatcccaaggagctgtcgggtggcgagatgcgccgtgtctccatcgcccgggcgctcatgaacgggccgaagctgctgatcctcgacgagccgaccggcgatctcgacgcgacgagcaccacgatggtcatgcgtctgctgcgcaacgtcgccgatgagacggcggcggtgcttatcgtgacccatgacggcgacacgttgccatacgctgaccgcgtgtatgccatggacgcggggcggctcaccccggccggcggagcctgacacgcagggtcgtccatagggtatgcgattataaacgattgtgtctgccataaggcggatgctatctggagtcttagcccatcagtgggtcggcggcggttttccgccgttcgtgcacgtcacgacgaagcactggggaggccgactcagcgcggggacagcctcgcgttccgttcagataacgacagaataaaggaacaagaatgaccaacgttcagcgttctcgccgtcaggtgcgcctttcccgcgccctcggcatcgcactgacccccaaggctcagcgcatcttcgaaaagcgcccgtacgctcccggtgagcacggccgcacccgtcgtcgcaccgaatccgattacgcggttcgtctgcgcgagaagcagcgcctgcgcgcccagtacggcgtctccgagaagcagcttcgctccgcttacgagaaggcgacccgcaccgccggccagaccggtaacgcgatgctcaccgatctcgaagtccgtcttgacaacctcgtgctgcgtgccggcatcgcccgtaccaccgctcaggcccgtcagttcgtggtgcaccgtcacatcctcgtcgacggcaacatcgtggatcgtccgtcctaccgtgtcaagcccggccagaccattcaggtgagggccaagagccagaccatggttccgttccagatcgccgccgaaggcgtgcaccgcgatgtgctgccgcccgtccccggctacctcgacgtgaacctggcttccctgaaggccaccctgacccgcaagcctgaagtcgaggagatcccggttcaggtcaacatccagtacgtcgtcgagttctacgctcgctgatctggatccaccacctgtaatttacagcgtaaggacatacatacacacgaacgccccgtggcattgcgcccggggcgttcgtgtattccggtcctgttctcacgggttcggccggccatcggccgcgttcatcgtcactggccgcacaccgcctgccgcagcatcgtcgcatacgcataagcgccggtcatgttgggatggatgccgtcgtcgtacaggtattcgccgtggccctcgctgtacttgtaccagtcgatgatgcccacattgccgttgtggctggctgcggcacgcatcatcgagttgttgttcttctcctggttcggatagggcatacggatcgtcacgaaatacaccggcttgccgcccgcaaggtcgatcagctgctggaccacctgttcgttgcggatgatgccgttcgttccgagcccgtaaatgatgacgctgccgctgtgcccggcagtggtcgcctgctggaacacgctgacggcctgaggcatctgacggttcggcttgccattgatgtatccgttcgggaacgccgcctggatcgcatccttcgtgccggaggtgacggaatcgccgatcatcatgatgtcggcgttgcagcttcctgtattggggtcatagtggtatttcgaagcatccaggttgtcgggcaccttctccgcaatgggcgtgacagatggagacgtcggctttgcgctgtctccgttccgctcggagccgtcgtcattcgtctgattcgccgtggcattgttgctcgccgtgccgtcgtccgagggcttttcgatgctcttcggcttgggcagggcgagaggcttcgccggctcggcaagttcgggccgcagtcggatcatgcggtcgtgggcgatctgctcccaattcaccggcgcccaggtgagcgcggccacggtgacgatgccgagagccgccatcacccatgatcccggcctcagccgtccgctcggctccgccgatgccctcgcatgcctgctgcgcggcgtcggctcgtacatgcgcgtggcctcgaccagctggtagaacgcctccgtcgccgtccatatcacggctgcctcaatcagccatccccaccacggcagtgcttcggtgcgggtggcgggattcatgaactgcagcagcgggtaatgcatgagatacagcgaatacgagcgcgaccctaggtaacgcagcggagcgcagccgagcacacgcggcaggctcactcctctgatggcgccggcgagggccaaggcgcccaatatggcggcgacaaggtacccgccgtgatacatcgtgtcgtcatagccgttcatgaaccagaaaccggcgcatagggccagcaacgacagccagccgaacacgtccaggatgatagcggacgcgccgcgaccgtcgtctgtctgtttgcgatcgtcagcggtccggtcggcacgctgcatcagcatcgccagcatcgcccccatcgccagctccgcgagcctcgtatccgtaccgtaatacacgcgcgacgtgtcgtcgggatcgaacagcagccacatcgccgcgctcgacgcaagcacgattatcaccatcacgacggtccgagcccatttgacgcgaacgagacggccgatcgccatgatcagcagcggccatacgagatagaactgcatgaccagcgcaaggaaccacatatgcgtcagaggggaggggagtccggccgccgcgaaatagggaagtttgcggaagatgttcacccagttgctggcgaacagcgcgcctggaagcgcgtcggtgcgcaccttgtcgagaaggctcggggcgaacagccatgcgaacggagcggtcagggcgattgtggccagtgttgccggccacagcctcttgatccggcgccccagataccttccatactggaacgtgccatggctgtccactgcgcgaatcaccgaacgagtcgctaggaagccggtgatcacgaagaacatggtgacaccgatgaaaccaccctcaagcagcgatgggcgggtgtggaatgcgaccacgccgagtatcgccacggcacgcaggccgtcgatgccgtcgaaacggatttgccgctggctgtcaggcagccccttctgttcttgctctctcatgtggcctagtctacttcaccgcgggtttcatggctatagttgtgacctgaacccgcgttcgcgtttattggtgttcttgcgcttgtgtttacctgtgttcatatgtgttcatccggcgaaagtcccatttattcgtcgccggatgggactttcgcgggaaaggcgtggggatgattccccgccgaccgtcatccggctatcgtctgtaccacaccatgcgatttttgacggttttggggctggtgtggccaagggcgattccgggcccattcaccggtcattggaaaatggcggtttccgcgacccgtgctttgccacaccacgtgatgtgaaggctcacatcgcatggtgtggctctctgctgtgccacaccatgcgattttggggtgtttttcgcctggtgtggcacacgggatgggagcgaatcagccggacggatgggtagggactgagtatgggctgttccattgagctgagaaccaccccccccagtcatgccgcgcatgccagccccccccgccagcgggggcgttagcagactggaggggtctgtggcgatgggcgcggcgggttttgtggcatgcgggaagcatggaataatcgtcggtatgattctccatctgcatcttgtccgccacggacagaccacgttcaacaggtataaccgacttcagggatggtgcaatgcgccgctgaccgaagcggggttggcggacgccgacaaggcggcggaaaaactcaagtacgtgcggttcgctgccgcgtactgctccgatacgtcgcgtgcgcagatcaccgcgaagcgcatcctcgacgtgaacgaggaggtcggcaacgcccggccggtgctcgtgtcggacatgcatttccgcgagcagtgctacggctatttcgaaggtcaggacatgtcgctcgcctggacggccgcgggagggccccacggcgcgaaggactacaacgacatcgtcgccaagtacggcctcgccgcgacccgcgacttcctcaaggaggccgacccgttccacgacgcggaatccgacgccgaatactgggtccgcgtgcacggggcgttttccctgatcgcgtccaacccggatctcaaggacggcgacgacgtgctgcagatatcccatggcaatacgctgctcagcctcatgcaccgcttcgcgccggaagggtatgacctgagcgagaggccggccaacgggtcggttacgtgccttgatttcgatacgaccaagccgttcgaagtggctctcagcgtcgtgtcatacaatcagtgagacgcgcgaccgggccggccgacccgcatgccgccggcagcgtcggtctcgggtgacggctagtgtgttgcgggtattgtgtgcacgggcgtatgcctgtgggacggaaaagaggtacacatgggtgttggccagatcgccggccttatcgcggcaatagcgttcgccgtgcttgcgggcttcatgatctatccgttgattcgcctcggcaagctgttcgaccagatcgcggacaccgtgcgcgagtcgggggagcacgccatcccggccctcgatgagggcgtcaccaccgtcaagcaggtcaacaaatcgcttgaggatgtcaacaggatctccgcggccgcgtcgtccactgccaacaacgtaggcgccctgaccgatctttacggttcgttcctcggcaagcccgtcatcaagatcgcgtcgttcttctatgcgctgaaatccaccgcgcagtcgttcgtcgccaagaagagcaccggccgtgactccgtcgaaggctccggacagcaggaaagcaaggctcagtgatgttcaaacgattgttctggatcggtgtcggtgtgaccgtcggcgccctagccgtcatcaaagcccaggcctatgtcaaggccaacacccctgacgccgcacgagcgttcgtgttcggcccggatcaggaccatgtgggcatgaggacgctggaaggcctggtcaacgagttcaacgccacccgccgagcccgcgaggctgagctcaaccaacattacatcgaccgcgccgcgcggtagcgaatccggggcatgccccccactttcacacgcataacagctgtttaaatttttatctatcattttgcatgcgggccagcacggccccaacccacaagggagctcaccaactcatgcgcacttcagaaatcgcgaagcgctatctggattacttctccaagcacgaccatctggtcatgccttcggcgtcactgatctcgccgaacccgaccacgctgttcaccatcgccggcatggtgccgttcatcccgtacctgctcggcgagcagacccctccccacaagcgcatggcctccaaccagaagtgcgtgcgcacgctcgacatcgacgaggtcggcaagaccacccgtcacggcaccttcttccagatgctcggcaacttctccttcggcgactacttcaaggaggaggcgatccactacgcctgggagctgctgaccacgccgcagcccgaaggtggttacggcttcgatcccgagaagctgtgggtcaccacgtacaccgatgatgaggaagcccgctcgatctggaagaacgagggcttcgaccccgagcacatgcagatcttcggcatggaagacaacttctggaccaccggcggccccggccccggcggcccctgctccgagatctacgtggaccgcggacccgaatacggcaaggacggcggccccgcggccgacgagacccgtttcatcgagatctgggatctcgtgttcgagaactacgaggtcgacaacgtcaagtccaagaccgacctgcacatcgtcggcgagctcaaccagaagaacatcgataccggtgccggtctggagcgtctggcctacctgatgcagggcaagcagaacatctacgagaccgacgaggtctacccggtcatcgaagcggctgagcagctttccggccgcaagtacggcgaggacgcggccgcggacgtcaagttccgcgtcgtggccgaccacgtgcgttccgcgctgatgatcatgtccgacggcgtgcgcccgtccaacgtcggccgcggctacgtgctgcgccgactgctgcgccgcaccatccaggccatgcgcgtgctgggcgtcaccgagccggtgatcccgcacctgcttcccgtctccaaggacgcgatggtcgccagctacccggagctcgaaaagacgttccatgacgtctccgaatccgcctacggcgaggaggacgcgttccgccgcacgctcgacaacggcatcgaaatcctcgacgtcgccgtcaacaaggcgaagaagacctccgacccggtcgtctccggcgacgatgcgttcacgctgcacgacacctacggcttcccgatcgagctgacgctggagatggcggccgaccagggcgtcaaggtcgatgaggccaagttccgcgagctgatgagcgagcagaagtcccgcgcccgtgccgatgcgctgaagaagcgccacaacgttgacctgagcgtgtacgacgacttcaagaagacgctcgtgcagcccatcgacttcctcggctacaccgacatgtccgctcgcggccgcgtcctcggcatcatgcaggagggcaagggttcggttccggccgtcagcgcccccgcgaacgtcgaggtcatcctcgaccgtacgccgttctacgccgaggccggcggccagctcgccgatcagggcgagatcctgtccgacgatggcgcggtgctcgaagtcgacgacgtgcagaagccgatcaaggatctcatcgtccaccagtgccgtctgaccgaaggcacgctggccgtcggcaccgaggtgagcgcgagcatcgatctcgcccgccgcggcgccatcgcccgctcgcacaccgccacgcacatggtccacaaggccctgcgcgaggagctcggcccccaggctacgcagcgtggatccgaggatgcgccgaaccgcctgcgcttcgacttccagtggtcgtcggcaccgagcaaggacgtgatgaacaccgtcgaggcgcgagtcaacgaccgtctgcgcgacaacctgatcgtcaccaccaccgaaatgaagttcgacgacgcgatcgcgctcggcgcgatgcacctgttcggtgagaagtacggcgacatcgtgcgcgtggtctccatcggcgaggacggctggagccgcgagctgtgcggcggcacccacgtcgaccacgtcggcaagatcggcttgatcaacatcatgtccgaagcctcgatcggctccggcgtgcgccgtgtggatgccgtcgtcggccagggcgcctacgagttcaacgcccgcgagcacgccctggtctcccagctgtccgacaagctcaacgcacgcccggacgagctggcggagcgcgtcaacacgctgctggccaagctcaaggaatccgaccgccgtctggccgccatgtacgaaggccagctggccgcgtccgtgccccagctcgtcgcggccgcgaagacgtccgcggcgcgtgtcaaggtcgctgcgaagaacgtcggccacttcggctcgttcgacgcgctgcgcaagaccgtgatggacgtccgcgcccagctcggcgaggacgcgccggtcgtcgtcgcgcttgccggcgtctccgaggacgacaagccgatggtcgccgtggccacgaacgaggtcgcccgcaagaacggcatcaaggccggcgacctggttcgcggggcatccaagatgctcggcggcggtggcggcggcaagccggacttcgcccagggcggcggctccgacgcgagccgcatcgacgaggcgctgaaggcacttgaggccgaggcgctgaagggctgaaccatccggtggtatggctaggcgttgatttgggcgacgccagggtcgggctcgcattgtccgaccctgagctcacctttgcccatccctatggcaacatccaggcatacggcgattcgttccgtgcgctggatgacgtcattaccgtcatcgaggacgaagcggtggaccacattgtggtgggactgccgcttcaacttgacggcaccgaaggaaaaagcgcgaagaaggctcgccgttggagcgcgaacctggaaaagcgcatgcgcaacttgatggatgaacacgatttcgcgttgtaccacattcctcaggtaacattactggatgaacggctgaccacggtcagcgcgcatcggcaattgctggaagcacaactcgggtcccgccgtcatcgtccggtggtcgatcagcaatcagctgtcgtgatattgcagaccgcgctggacggcgccatgaaagtgtgaggagagagctagtgtcagatgacctcgccgattttttcgaggagaacacccattgggtcgactccaaaggcaacaccacgtcggtaaagccccccagaccgccgaaatcacggcgtgaaatgcgccgtcggcgcaatgtccgccgccgcaagaccatcatcgtgctgaccatggtcgtcgcggtgctcgtcgtggtcatagccggcgggttcttcggagtcagggcgttgcgcgccatcagggaccgcaacgacggtgacacctactccgtgcaggactacagcggtcagggatacgggtccgtggagttcaccgtctcgcagggcgagagcccgtccagcatcgccaagcgtctcgtcgaggccgaagtggtcaaatccgcggacgcgttcaccggtgtctcatcgggtatgacgctatacccgggcacttatcagctgcgcaagcacatgcccgcgtcgtccgtggcggcgatcctgtccgatcagagcaaggcggagggcttcctcgacgtcaacgcgggggagcgtgtgtccgacgtcatcaagaaggccgcggcgctcagcgagatcgacgaatccgaattccagaagatcatcgacgccaaaggcgagggaatactgcccgcggaagccggcggcaacttcgagggatggctggaacccggcaagtacgacgtcaagggactcggctccgcgcagaagatcctgaagaccatcgtcgacaagcgcgtctccaagctcaacgagatgcacgtgcccaccggcagcgagcggcagcggctgctgatcatcgcctccatcgcggaggccgaggtcaattcgtccgattactacggcaaggtgacccgcgtcatcctcaaccgtctcgaccgcgacatgacgctgggcatggattcgaccaccgcgtacggtctgggcatcaacggcacgcagctgaccaacgcgcagctcaacgactcgtcgaacaaatacaacacgcgcgtcaacaagggactcacccccacgcccatcagcaatccgggagacaacgccatccaggcggcgatgaacccggagcagggcgactggctgtatttcgtcaccgtgaacctgagtaccggcgagacgaaattcaccaccggctccgtcgaggagcagaacgcgcagttcgagcagtacgtcaaggaatacaaggacaacaacaagaacgcgaactaaagcagcgtcgtcgcgatgaccgcgaccaccgccgcgcagacgattgcgggtgcgaacgggaccttgcccgcatggtcggatcggcgctggggatcgaaccttagccacagcgccatccatgccaatcccagcagacccatggccagccaccagaccaccacggcggtcagcccggccatccccacggccaggcccatggccagcgtgcaggtcacgtcgccgaaccccatcgatccgggcttggccatcgccagcccggcctgcagcacggcactgagcgcggcgaacagaggggcctgtaccagcaggaacatcgtgttcgccatgacggcgacgatgatgaccgccaccagctgtgccaggcacccgatggcgatccacaggcgcggcacacgccggcgccgaatgtcctcgacactcacggcgataccacatatcaagctgggaaggtatgcaaggtaggtcatgacataagatatagcgaagttaccgattgaatcaaaggagcatggcatgttgcgctggcagacggcgggggaatcacacggcgaggcgctggtcgcgatgatcgaggggttgcctgcgggcgttcgggtcaccagcgatgacgtcgtcgatgcattggcgagacggcgcctgggatacgggcgcggcgcgcgcatgaagttcgagcaggataaggtgcgtctgctcaccggcgtgcgtttcggcgagaccctgggatcaccggtggccatcgagatcgcgaacaccgaatggccgaaatggaccgaggtgatgagtgcggatccactcgaccacgatctgccgcgtgaggggcgcaacgccccgctgagcaggccgcggccgggacacgccgacctcaccggcatgcgcaaatacgggttcgacgacgcgagacccgtgctggagcgctccagtgcgcgcgagaccgcgtcccgcgtggcgctgggcgcggtcgccgcgcggttccttgagcaggcgttcggcattcgcaccgtgtcgcatgtgatctccatcggaggggcgggcgtcgaggacgccgatgacgcagcgttgccgacccccgacgacgtcgaagcgctggatgcatccccggtgcgtacgctggacaaggcggccgaggagaggatgatcgcgcgcatcgacgagatcaagtccaccgccgataccgtcggcggcgtgatcgaagtgctcgcatacggcgtgcccgccggcatcggcacctacgtcgaatcggatcgccggctcgacgctgccttggcctcggcggtcatgggcatccaggccatcaagggcgtggagatcggcgacgggttcctggaggccgtgcgccccggatcgcaggcgcatgacgagatggtccccggcgcagatgggcgcatcacgcgactgaccaaccgtgcgggcggcatcgaaggcggcatgtcgaacggccagccgattcgtgtacgggccgcgatgaagccgatcccctcgattccgcgcgcccttcgcacggtcgacgtcaccgacggcgaggccgcatccgccatcaaccagcgttccgacaccacggccgtgcctgcggcctccgtcgtggccgaggccatggtccggctcaccttggcgcgatacgcccttgacaagttcggcggagacagcgtagcggagacgcgccgcaacttcgagcagtacgtcgcctcctggccggagcacatgcgctgacggcgcggtaacgtcatccgcaacgaaccgtacgtcctgaaccaagggagagaaaccatgcccactcgaccagtcgccgtcatcatcggtatgatgggcgccgggaagacccgtgtcggcaaggaggtcgcgcagctgatgtcgatgccgttcgcggatgccgacgtcgaaatcgagcacgaggtcggcatgcgcatccccgaatatttcgagcgtcacggcgaacccgcgttccgcgaggtcgaatccgaggtcatcgccgggatgctgcacgggttcggaggcgtcttcgccctgggcggcggcgccccgatgacgcccgcagtgcaggacgatctcaaggaatacatcgaggacggcggcaaggtcgtgtatctcatggccgacccgcgcgaggccatggaacgggcccatcgcggtggcggccggccgatgctgcagggggacgccgatgcccgctggaagaagctgtaccgccagcgcgacccggtgtactaccgggtggcgaacgtccatgtcgaaacatacgggcagacgccgctcgccgcggcgaggaagatgatggatatgattaccgaacgaacggttcatgtgaccggcgcgaccatcgaggattatgacgtgagcatcggggaaggggcgatgaaccacctctccgaggtgctggggccgaagccggtccggatagccctgatccacacgcagccggtgcagcgtcattccgaccgtgcccgcacgctgctgcgacaaggcggctaccaggtgtcggacatcgtgatccccgacgccgaagcgggcaagacgatcgaggtcgccaacggcatctggcagcggctcggcgacgagggcttcacacgctccgacgccgtggtgggcgtcggcggaggcgccgccacggatctggccggtttcgtggccgccacatggatgcgcggcgtgcggtacgtcaattgccccacgtcgctgctcgccatggtggacgcctccacgggcggcaagaccggcatcaacacgccgcagggcaagaacctcgtcgggtcgttctacacgcctgccggcgtgctcgccgacctcaagacactcgtctcgctgcccaacgacatcttcatcgaagggctgggcgaggtcgccaaatcgggattcatcaaggaccccgagatcctgcacatccttgaagagcatgcggccgaacttcgcgcattcgacggggctacgttccttgacagcggtctggagaacgtggtcgccgaactgatcgagcgcacggtccgggtcaaggcgtaccacgtctccgcggacctcaaggaagcgggcctgcgtgaattcctcaactacggccatacactcgcccacgccatcgaaaaacttgagcatttccgctggcgccacggcaacgcggtcgcggtcggatgcgtgtatgcggcggaattgggtcatctgctgggctatatcgaccaggatctggtcgattatcaccgctctctgcttggctcgctcggtctgccgacctcatggaacggcggcacgttcgacgaagtgctggcgctgatgcaccgcgacaagaaggctcgtggcaacaagctgcggttcgtcgtgctcgattcgatcggccatccggtgcatctggacgatccgccggcggacgcggtcgaggaggcattcagacgtatccaggcgtgacgacgccggaccggtctccacatgaccggtccgagtcgcgttttcgcccaccccagcaatatcaatcatcagccaaaggaaagtgcatcatgaccaaggtgatagtcgtcaacggaccgaatctgggccgcctcggagtgcgtcagccggacgtctacggcaggcaggatcttgagacgctgcgcacgcaatgctcccagtggggcgccgcgctcgggctgaaggtcgaggtgcgccagaccgacgacgaggccgagatggtgcgctggatgcatcaggccgtcgacgagcagaccccggtggtgatgaacccggccgcattcacgcattactcgtacgcgctggccgacgccgcgcacatggtgggcgatgccggactgccgctgatagaggtgcacatctccaatccctccgcccgtgatgagttccgcaagcgttcggtcatcagcccggtcgccaccggcaccatcacgggaatgggattctacgggtacaagctcgcgctggacgccatcgcgcatcttatcggctgatccgcagtcgcagaaccgtttcaacgggtggtcatcattgctggtgcgcttgcgcgtcgggcttgctgcgcctagtgtggtgtccatgaacgatgaagcgaatcaggggtacccgcaaggtccggccaatggcggttatccgaacggtgcatcgctttacggggttcagggcgatgcacacaacggcaacaacgattatccgcagtatggagctgcttcgcagcccggggagcatcagcccggttacgcgcagcccggttacccgcaacatgactcctggcagggtcagggcggctacgccggcggccagcgtccgccggcaggcgggcagcccgtctatcctccggtgggagcaggccaacggcagcagccatacgccggcggctatccgcagcagggtgcgtatcagcgtactccgtaccagccgtacggtcagcctccgaagaagaacaacacgggcaagatcatcgccatcgtcgtctccatcgtcgtcgcgttggccctgatcggcgtgctggtttgggcgttgacgtccaagggaggcgacggcaaggacggcaagggcaccgaaacgtcgcagacgacgaacggcggttcgaacaacaagaacaaagatggctacatcgaggttccgcgcggcgactcgaacggaaactccgacgacgactcctacgactccatcaacaaggactaccagcagaagaagcaggagctggacaaaaagaagcaggagctgcagcaggaactcgacaactacaagaagaagtacggcggctcaagctcgtatgacaaccagaattcgtacgattcgtatggcgactcctatgattcgtacggtgattcctacgattcgacgggctactgatccgcgtcgaacgaggtgtcggccggctcgacgcggctgaccgcgttcgaccggtagattgtgtgacgcgggcatcatccctgacggcgcatgccgtcttcggtatgatgcccggtccatttgagcaccgcctggacgcggttttcggcgttgagcttctgcatggatgactgcgcgtgcttgcgcacggtggccgctttaatgccgagtcgtttcgctatcgataggtcggtcagcccacgcgacataagatcgagcacctgcacttcgcggttggagaccaggtcagcccgtttcggcgtctcatgcgcgagctggtcgaatgaggcacgggcgtcaacgaacccgaaatcaccgtaaacgcctccgccaagtaccgtcgccaagccttcgagtatttcctgctcgtcgttcttgctgaccagtccttgggcgccggcctgcgccacgtcgaatccgaacgtctccttggcgaacgaggtcatggccagaagcttcaccatgctgtcgcgtcggcggatacgacggcataccatgacgcccgacatggattccatcgacaggtcgaccaggaccagatctggtctcgtccgggcgtccagcgtcaggctcacggcgcgcggcccgtcgatgaccgaccaggctatgcgcagtccaggtgtcatttcgagaacgagacgctccagcgaatccaatgaccgcctgtcatcatcaaccatgccgattgtcccagtcaggtcatcgaaaatccccatacaatcacatacctcatcatatgctttcaggtttccccccatagtaacccccttatatacccccgtcaaaatcaacgggtgttgcatccatgcccccatgtttgatgccaggatatgagggtgcattgttgctgtaagcctcatcctgccaaagtcccatttgatggtgtcgggatggggctttggcgggatgaggcagaggccgttgttcgtgtggcatggcgggatatgaggctattggtacgattccgtaacagcctttgaagttccgtgccgattgcgtgtgtgaacgtcacgaggggaatcgtcgttgccgggatcgtcggcatgaagcccatatatcgggatcgatcgtcttgcggtgcatcctgcggttccggggcctccgacgggcagactggtgtcgtgtagcaggccggcaccgcgccgcagcgtctctgcgtcagagctctggcggatgggcaagtcagtcgatatggtcgggatcagtatcctgccgatgaccgtgcccgaatctccggagccgttctgttgctcggcatccggttgcccgagatcgtattgtcctgaatcaatgagcctccggttgtatgcctgtgcttcgtcaaccgtcattccggtttcgttcgtcatgccggtttcgtttcgaggcgacgattgcatggaggacgcggttctccatgccgtgtcgccgacgacatcgaatccggtcactgtaccgccggcatgcctgacatcgtcatatcggccgatgcgcgtcaccgtgaacgcatgacccgcaagcgtgagattctccccggcgcgaagcgtgatgccgctcgtcgctgcatgcgcgggctccgagcgcaacgcgctgatggacatgacctgcggcaacatggccaacgtcgccatgaccgcgaccgccgcagcccgcagtccgagacggccggcgagccgttgcgctggcggcggcccgatcatgccgcacaggaatccgtcataggcagatgatacagtgaaattccatggttagaagacaacatggcaattctcaagaacacatcaccaagcacattttcgttaccggtggcgtggtctcatccctcggaaaaggcctgaccgcctcctcgctcggtcgtctgctgcgcagccgcggcatccatgtgctgcagcagaagctcgacccgtacatcaacgtcgacccgggcaccatgaacccgttccagcacggcgaggtctatgtgaccgaagacggtgccgagaccgatctcgacatcggccactacgagcgcttcctcgacgtgttcctctcccagaaggccaacgtcaccaccgggcagatttatcaggaggtgctgcgcaaggaacgcgcgggggagtacctcggccagtgcgtgcaggtcatcccgcacatcaccaacgagatcaagtcccgcatgcgcgcccaggcgagcgatgatgtcgacgtgatcatcaccgaaatcggcggcacggtcggcgacatcgaatcccagccgttcctggaggcggcccgtgaggtgcgtcgcgacctcggcgccgagaactgcatgttcgtgcacgtctccctggtgccctacatctccgccgcgcacgagctcaagaccaagccgacccagcactccgtgatgatgctgcgccagctcggcatttccccggatgcgctggtgctgcgttccgaccgcccgctcaacaagtccatcaaggacaagatctccctgatgtgcgacgtggatgaggagggcgtggtcaactgcgtggacgcgccgagcatctacgacgtgccgcgcatcctgttcgacgagggccttgacgcctacgtggtgcgcgagctggggctgccgttccacgacgtcgactgggacgagtgggctgacctgctggagcgcgtgcaccaccccaagcacgaggtcaacgtggcgatcgtcggcaagtacatcgacctgccggacgcctacctgtccgtcaccgaggccatcaaggccggcggcttcgccaactgggccaaggtcaacgtcaagtgggtcgccgccgacaagtgcgagaccgaggagggcgcggccgccgcgcttgaccaggtcgacggcatcgtcatccccggcggtttcggcatccgcggcatcgacggcaagatcggcgcgctcaagtacgcgcgcgaaaacaagctgcctgctctcggcctgtgcctcggcctgcagtccatggtcatcgaatactctcgccacgtgctgggcatcgaggacgcgaactcctccgagttcgagcccgactgctccaacccggtcatcgccacgatggaggagcagaaggacatcgtcgccggccacggcgacatgggccacaccatgcgtctgggcagctacccggccgagctggaggaggactccctcgttgcgcagctgtacggcaccacgcatgtcaccgagcgtcaccgccaccgctatgaggtgaacgtggcctacaaggatctcctgcgcgaggggggcctgcgcatttccggtcagagcccggacggcgagctcaccgagttcgttgagctgccgcaggatgtgcacccgttctatgtcggcacccaggctcacccggagttcaagtcccgcccgaccaagccccaccccctgttcgcggggctcgtcaaggccgcgctggatcaccaggaagcccgtcaggcctgagcgtgtggctttaagagtagactgatacgtgacgatggggatgctcgaaagggcatccccatcgttgtttagtgcgggtccggcgatcattgcggagaaatcgcaatataagcaagctcacgttttgcgctaagccaacatgcgggtctgctgtggagttcgccgtgaggttctgctaacttaacgtaggaactatgtgatgaataggaggcagcgtcaaggtgagcgacacccagcaggcgcccaacgccgcgtccgacgtggagatgagccagtatgtggccgatcgccagcgtgtggacgaagagaaactcaaaaaggatgacgagatcatccagcaattcggtgattacacctacggctggcatgattccgacgcggccggcgaggccgcgaagcgcggcatcgatgaacaggtcgtgcgtgacatcagcgcggacaagggcgagccgcagtggatgctcgacatgcgtctgcgcggattcaaggcgttccttgagaagccgatgcccgattggggcgtggacctgagcggattcaacgccgacgacttcaagtactacgtcaagccgatcgacaagcaggccaagacgtgggaggagctgccggacgacatccgctccacctacgaccgactgggcatccctgaggccgagaaaagccgtctggtctccggcgtggccgcgcagtacgagtccgaagtgatttacaactccatccagaaggacctcgccgaccagggcgtgatcttcgtggacaccgataccgccgtgcgcgaataccccgacctggtgaagaagtacttcggcaccgtcgtgagccccgaagacaacaagttcggcgccctcaacactgccgcatggtccggtggctcgttcgtgtacgtgccgaagggcgtgcacgtggacatcccgctacaggcctacttccgcatcaacacgccggccatgggccagttcgagcgtacgctgatcatcgccgacgaaggctcctacgtgcactacgtcgagggatgcaccgccccgatctggtccgaggactcgctgcacgccgccatcgtcgagatcatcgtcgagaagcatgcgcgcgtgcgctacaccaccgtgcagaactggtcgaacaacgtctacaacctcgtcacccagcgcgcctacgtgcgcgagggcggcacgatggaatgggttgacggcaacatcggctccaaggccacgatgaagtacccggcgtgcattctcgccgagccgtacgccaaggccgagaccatgtccctcggcttcgccggcaagggccagtatcaggataccggcgcgaagatgattcatctcgctccgcacaccagctccacgatcgtcgccaagtcgatctcgcgcggcggtggccgctccgcgtaccgcggactggtcaagatcgtcgacggagccgaaggctcgtcgaactccaccgtgtgcgacgccctgctggtggacgacttcagccgttccgacacgtacccgcatgtggacgtgcgtgaggacgacgtgacgatggcccacgaggccacggtctccaaggtctccgaggatcagctgttctatctgatgagccgcggccttgaggagaaggaggccatgggcatgatcgtgcgtggcttcgtcgagccgatcagccgcgagctgccgatggagtacgcgctcgaactgaaccgtttggtcgaactgcagatggaaggatcggtgggctgattcccatggcatcgaacaatactgaaatcaccattcccgtcgcggatccgaacgacccgtacgcggtgccggcggccatgccgtcgagcgccgacagggagccgcgctcgttcgacgtgaacgatttcgccgcgccggagcgcaagcaggacgattggcgctacacgccgctcgatcgcatcggagagttcttcgacgtgttcaagccgagcggggagacgatcatcgcgatcagttacgccgatggcaccgcggtcgacgaaaagcacgtggccgtcagccagtgcgccctcggcgaaggagtctccggcacggtctccaagcccagcgatcgggcggccgccgtcgagtggaattccgggcgtaccgcaacggtgatcgagctgtcgggcgagatcgcccagccggtgctggtcaacgtgatcggcagcggcgacgacctcgatgccctgcatctggtcatctcgacggccgatgaggcccacgccgacatcatcgtcgagcaccacggtctggcccgtctcgccgaaggcgtggaaatcgtcaccggcaagaactcccacgtctccaccaccttcgtgcaggagtgggagaagggctccaagcacgtcggcaaccagcgcatccacgtcggcgagggcgcatccctgcgccactccgtcgtcacactcggcggcgacgtggtccgtatccgcatggatcaggacttcggcggcgagcagggcgacctcaacatgctcggcatctacttcgtcgaccccggcgagcacatcgagcaccgcacgatggtggtgcacaaccatcccgagtgcaagtcccgtgtggtctacaagggcgcgctcgacggtaaggacgcgcactccacctgggtgggcaatgcactgatcgcgccgaccgcgccgggcaccgactcgtatgagctcaaccgcaacctcgtgctcaccccgggtgcggtcgccgattcggagccgaacctcgaaatcgagaacggcaacatcatcggcgccggacacgcgagctccgtgggccgtttcgacgacgaggaactgttctatctgcagtcgcgaggtatccccgaaacggaggcccgcaagctcgttgtacgcgggttcttcggagaactcgtcgaagagatcggcgtgccattcatcgccgaacacctgatgaacgtaatcgaccgccgcctcgcccgcggcgaaagcgacgccatgaaagccgtattggaggataagtaacgatggccgaacagcacactctcgaaatcaaggacctctacgcatccgtggagaccaaggagggtcgcaagcagattctcaaaggcgtgaacctcaccgtgcattccggtgagacccacgcgatcatgggccccaacggctccggcaagtccacgctcgcctacacgctggccggccaccccaagtacgaggtcgactcgggcgaggcactgctcgacggcgtcgacatcctcaagcagacccccgacctgcgcgccaaggaagggctcttcctcgccatgcagtacccggtcgaggttcctggcgtgtcgatgaccaacttcctgcgcaccgccaagaccgaggtcgacggcaaggcccccgccatccgcacctggaccaaagagctcggcgccgcgatgaagaagctgcgcatggacccgaagttcgcgtcgcgttccgtcaatgaaggtttctccggcggcgagaagaagcgcgccgaagtgctccagctcgaactgctcaagccgaagttcgccatcatggacgagaccgattccggcctcgacgtggacgccctgcgcatcgtgtccgaaggcgtgaaccgcgccaaggagagcaccggactgggcatcctgatggtcacgcactacacgcgcatcctcaagtacatcaagcccgacatcgtgcatgtgttcgcagacggccacttcgtcaagaccggcggtcccgagcttgccgacgaactcgaagagaccggctacgacaagtacctgcccgaaggctccgactccgaatcggctctggcctgatttcttcgtttcgttgcgtttgaggtgtggtcgcattgcctgggggtgtactattcccgaccgtaaacttggcccgagcggcctggagcgatcccgggaacaggacatccctgcaccccgcggccaccgccggaagcatgatccaccgctggaagcggcgagcgaataagcggataactgaaaaacgacatatcggcaggacattgaatctaagggaaacaatggttgattttacggcgattcgggcgcagttcccgattctggatcagcagatccacgggcatccgctcgtctatctggattccgcggccacctcgcagaagccgcagtgcgtgatcgatgcggagagcgagttctaccgcacgatcaacgccggcgtgcaccgcggggcgcatgagctggcggcccgcagcaccatggcgttcgaggacgcccgcgcgaaggtcgcccgcctggtcggagccaacgccgaggagggcaacgaggagatcgtcgtcaccgccggggccaccgcgggactgaatcttcttgccaccgcgttcggcaacgcgagtctgggccgtgggggagaggcggcgaaacggttcgctctcaagcccggcgacgagatcgtcgtatccaaggccgagcaccattccgtgctgctgccgttccaggagctggcataccgcaccggtgccacgctcaaatggttcgatctgaccgaagacggccgcatccgctcggataccgccgatgaggtgatcacggaacacaccaaggtcgtcgccatcacgcacgtgggcaacaccacgggtgccatcaccgacatcgcgcccatcatccgccgtgcccatgaggtcggcgcgatcttcatccttgacgcatgccagtcggtgcctcacctcaaggtcgacttccacgcgcttgacgtcgatttcgccgcgtggagcgcccacaagatgtacggtcccaccggggtgggattcctgtacgggcgccgtgagctgttggaggccctgccgccggcgaatttcggtggttccatggtcgagcttgcgtggatggaccagcccgcgcagtacatggtgcctccggcccgtttcgaggccggtacgcagccggtcgcccaggtggtcgcagccggtgtggccgccgaatggatgatgaacgtggggcttgagaacatcgaggcgcatgagcgcacgatcgccgccgaactgctcaagatgggcgacatcgacggcgtgcggattctcgggccgcgcgagaacgtgaaccgcatcggcacggtggcgttcgacgttgcgggcgtacacccgcatgacgtcgggcagttcatcgacgcgcaaggcatcgccatccgcgtcggccatcactgcgcccagccggtgcaccgccacttcggtctgtatgcgtcgaaccgcgcatcctccggcgtgtacaacagcgtcgacgacgctcacgccctggtcgaggccgtggcgaaggtccgtccgttcttcggactgtgatacgtgtcgcgtttacgccgttcgtgtatgactcccacgggatactgtcacggcatgtggcataatatccacggaatctcacgcggacggtgtttcgcgtgttcgtgaatgatatcgagcgctatcgagcgctatgcatgggaagggattgaccgatgggtgatttcggcatgagcggcgacgatcttgagcagatgtatcaggaagtgattcttgaggccgcgcgtgacccgcatggtcgcgagcatttcgcgacggacgtgtccaaggaacagggctccgcgccggccgacacgaccgtgcgcgccagccacgaatactgcacgccgggcgaatcccaccagttcaaccccacttgcggtgacgaggcgacggttcacgccgaggtctccgacagcgagccgcacaccatcgagcgtctggtgtgggacggccacggctgctcgatctcgcaggcgagcctgtccgtcatggttgacctgtgcgctggcaagaccgtcgacgaggcgatggagctgttccgcgacttccatgagctcatggagtcgcgcggtgctggattgcaggacgaggccaaggaggagaagctggaggacgccgtggtgttccagggcgtgtccaagtacccgatgcgcatcaagtgcgcgctgcttggctgggagggcatgcgcgactccgtcgccaaggcgctggcggcgaaataaacggtcaccgcactgccatgagagcggtccgagttgtactcttgatttaacggtttcgcgattaacgactggagagatatgagcgacaatctggttcctgagccgcaggcttccgtgttcgattcggtgagcaaggttctgggcgacgaggaggcggcgcgccgcgtgatggcgaacccgcagcttgcggctgggttccccaacggccatcctgcccccaaaagcgatggcggcgtcgagatgtgcgcgtgcggccgccatccgaagagcgagtgcgaggatggcgagcacagcagcgaggatgacattccgctcaaggccatcgacgatatcggccgtgccaccgccgaggatgtgaaggaggccctgcatcaggtcatcgacccggagctgggcatcgacgtcatcgacctcggtctggtctacggcatcgagatcgatgagcttggacgcgcgatcatcacgatgacgctgacgacgcccgcatgcccgctgaccgacctcatcgaggacgagtgcgcgagcacgctggcgggtcttgtggaggagttccgcatcgactggacgtggcagcctcgctggacgatggacaagatcacgcccgaggggcgcgagcagctggccgcgctcggtttcaatttcgacaacatgccgaagtactgacctcatccgtgtctgcggcttctctgtacggtcgaagacacgtgaatatagttgagggggtttgccgtgaatccggcaaaccccctcaacgtatatccgagccgatcagtcgtccacgatggtgcccttcggcacgacggtgatgccttccggcgtcacggtgaagccgcgggcgaggtccttctcggtgtcgatgccgaccgtggagttctcggtcagcacaacgttcttgtcgagaatcgccttgtacacgcgggcgcgacggttgacgatgacgccgtcgaacagcacggagtcgaccacctgggcccacgaatggatgcgcacgttcggtgacagcacggaatgatgcacctcaccgcccgagacgatgacgccgggggagacgatggagtcggtcgcgtggccgagacgatcgcggccggcatgcacgaacttcgcggggggcagcgtgcccgagttcgtgtagatgggccatgcctggttgtagaggttgaactccggcacgtaggcgatcagatccatgtgagcgtcatagaactgcttgatcgtacccacgtcgcgccagtaggcgtggtcggtcggcgtggagcctggaatgacgttggagttgaagtcgtacacgccggcctcgccgcgcgaggcgaagtacggcgcgatgtcgccgcccatgtcgtgcttggtgtccgcggccttctcgtctttggcgagcgcatcgaacagcgcgtccgtgttggcgacgtagttgcccatcgaagcgaggaacgaattcgggtcgtcgggcaggccttcggtcgtcgccggcttctcctggaattcgcggatcatgttggggtggttcgggtcgacgttgatcacgccgaactggttggactcctcaagcggctggcggatgcctgccacggtgaactccgcacccgattcgatgtgctgctcgaccatctggccgaagtccatgcggtagacgtggtcggcgccgacgatgaccacgatgtcgggctggacgtcctcgatgatgttgatggtctgatagatcgcgtcggccgacccgagataccagtgcttgcccagacgctgctgtgcgggcacaggggagacatagttgccgagcaacgacgagaaacgccacatctgcgagatgtgacggtcaagggaatgcgacttgtactgggtcagcacaatgatatggcggtaatccgaattcaccaggttgctcaaggggaagtcgatcagtctgaatacgccgccgaacggtacggccggctttgcacggtcacgtgtcagcggcatgaggcgcgtgccttcgccgcctgccaggacgatggagagaatcttctgcttgttcttcgccatctgagtgctcctctcgttgttcacagcgtctgatgacaccgtctgcctgtccgcccctgcttcgttgccggagcctacagaaacaataattgcacatttccccgtgagcgcaaggaaatggcgttgcgcgtcatgaaaaagtcatgaaaaatatccgatctgttcttattgttccgcgcgcttcggggatgtcgcgtagaaggcgacggcgctggacgcggcgacgttgaggctgtcgacgccgtgggacatcgggattttcacggtcaggtctgcgcccgcgatggtgtgacgtgacaggccgtcgccttccgtgccgaagatcagcgccagtttgtcgatgtggtccgcggattcgggactgttgttcagccggcgtgtcagctcgtccagcgatatcgagtcgtcgctcagcgccatcgccaccgtggtgaatcccagcgagcgcagttcctccagtcctcggcgcggccagaaatgcttgtcgtcgcctccgatgcgcgtccacggtatctggaagacggtgcccatggacacgcgtgcggcgcgccggtacagcgggtcgccgcacgacggggtgaccagcaccgcgtcgacatccaacgcggccgccgagcgcatcagtgcgcccacgttggtgtggtcgacgatgttctccatgaccgccacgcggcgagcgtcgcggcatgtctcctcgacgctcggcagcggccagcgccgcatcgccgaaagcgcccctcggtggaggcggtatccggtgagctggcgcagttgttcgggggaggccacgtatacggggatgtccgttccccaccgtttgtcgacgacgtcgaaggtctgtgacatgccctcgatccaaggctcttcgaccagcagcgagatcggttcgcggcccgcggcgagcgcacggtcgatgaccttgggcgattcggcgatgaacaggccacgctcgggttcgagccggttgcgcagctggatttcggtgaggttcgtgtatgcggcaacccgctcgtcgtcgatggagtcgatggtgatgaattgcatgggcgtgcctcgggttctcatgtcgtcgtaccgtcgtcggcccgattgcgcgcggccgtctgcgcatacggtatgtatatatggaaagaccccttgtttccaaggggtcttcgctggtgtccgggatgggacttgaacccacacgcctgtataaaataggcacaagcacctcaagcttgcgcgtctaccattccgccacccggacaggtgtcgttttcagacaacgagtaaatactatatcggtattttcggatgatgccaaatcatggcgtgtcgcctgtgtttgcggggatgttgtagccttgtatccatgactgatcctgtattccttttcgaccctgacaccgatgatgtgccggtgaacggcgatggtctcaacgcggggtggacgatcacgctgccggcctcggtgaagtgccatgccttgggggccatgcgcctcgccgagggcgacgggctgtcgctgaccgacggtcgggggctgtgcgtcaagaccacgctcgtcgacgcgcaggccggtctcgtcagcgtcgagcgcgtcgggcggcagccgcagccggtcacgcggctcgtgctcatccaggcgctggcgaagaccggtcacgacgaggcggccatcgacatggcgacccagatcggcgtcgacgaggtaatcccctggcaggccaatcgttccatcgccaagtggaaggcgggccgtactgatcgcaaatggcggcaggtcctcggcgcggcgaccgagcagtcgcgccgcgtgtggtcgccggaactggcgcagtgcgtctcaagcaagcaggtcgtcgccatctgcaggcgcgcgtgcgtgcatggcgatctggtgatcgtgctgcaccaggacgccaccatgtcatggtcgtccgtggaggacgaggtctcgcggctcgccgaccgttgtctcgccgacgggcggccgcgcagcatcaatgtcgtcgtggggcctgagggcggcatcagcgaggaggaggtgtccgatttcgtcggggccggcgcccagagcgtggtgctcggctcgaacatcctgcgcgcatcgacggcgggcccggtggcgctgtcgctgctgtcgagggcgttggggcgtttcgcgtgaagccgagaatatccttaatacgcaatagcatggaagcagatttccatcacggccagcaaggagcggcgagcatatgagcaagtccgaggactgcctgttctgcaagatcatcgacgggcgcattcccagcgagaaggtatacgaggacgacaccacgtacgcgttcaaggatatcaatcccaaggcgaaggtgcatgtgctgatcgtacccaaggaccactacgcgaacgtcgccgagctggccgccgccgatcccgcggaactggcccatatcgtcgggctcgcccagggcatcgccgacaaggagttctcgggcgcgtaccgtctggtgttcaacaccggcctcgacgccgggcagaccgtgttccacgtgcacgcgcatgtgctcaccggcgagaagctcgacgagtagggcgattcgtgacaacgacgacccgtaccatcaccatcccgtcgcagcttgacccggtggccgtcttcggcccggtcgacgaggtcatccggcaggtcgagcacgcgttccctgacctgaccatcatcgtacgcggcgacagggtggccatcgtctcccattcgaagtccaccgaatcgcaggcctctcgcgccgaagacgtcatccatacgattatccaggccgcgtacagcgccccgatggacgccgacaccgtgcgcaggctgctcgaccaggacgtgctgcccaacaaggtccgcgccgaacaccccggatacggcaggtccgccgagcggggccgtgcgtcgctcggcgcagcgcgttcaggggatgcgcgcaagcctcgcatacccggcgtcatcactttcgcggccgggcagcccgtgcgtgccaagacggcggggcagatcgcctacgtcaacgccgtggacgcccacaccatcaccttcgcgatcggcccggccggcacgggcaagacctacctcgccgtggccaaggcggtgcgcgcgttccaggacaggcgtattcgccgcatcatcctgacgcgcccggcggtcgaggcgggggagaacctcggtttcctccccggcacgctcaacgacaaggtcgacccttatctgcgcccgctgtatgacgcgctgtccgacatgctcggccccgaccagctgcaccgctatctcgacgacggcaccatcgaggtcgcgccgctcgcgtacatgcgcggacgcacgctcaacgacgcctacgtgattctcgacgaggcgcagaacacgacggaacagcagatgaagatgttcctcacccgtctcggattcaacacgacgatgatcatcaccggagacgtcacgcaggtagacctcgccgtgccgcgatccggtctggccaccatcgagggcattctgggcggcatcgacgacatagcattcgcccacctcgacgccggggacgtggtccgccatgagctggtcgggcgcatcgtcgaggcatacgaccgtcatgacgccacccgtgtcaggcgcaaccgaggcaaggaatcgcgggaggacgcacgatgagcgtggaagtgaccaacgagaccatctgggacatcgacgcaaaggcgttctccgacctgggcctgtgggtgatggaccagatgcgcgtgagtacccagtccgatctgaccatcctgttcgtggatcccgatcccatagccgagctgcatgagcggtggatgtcgctggaaggcccgaccgacgtgatgagcttcccgatggacgagctgaggcccggcgacggcaagaccacgatggagggcgtgctcggcgacctcgtcatatgcccctgggtcgcggcccagcaggcggccgcggcaggtcacagcaccatgcaggagatgatgctgctcaccattcacggcatcctccacctgctcggctacgaccatgtcacgccggagcaggaaaggcagatgttcggtctgcagcggcagctgttgctcacgttcctggccgtgcgccgcatcaccatcgaaccggccacattgccgaagggcgcggccgacgcgcttgccgaatacgacgcgtcgcacggcggcggacggcagataacggaatgacgcgtcttttccccgtcgccgttcggcggcaatgccgtcaccggcgctgaacacatgaactcaaacgaaggattcctatgccgttgaccgatacgtccacgattatcctggttgtcgcgttggtcgtcgtcgccgcactgctggtctggctgtcgttgagcatggccgccgcggaaagtgcggtcgggcgcgtcacacgggcaggactgaacaacaagatcctcgaagtgcagaccgacaccgagacgagccagttcatccggatgaagaagatcggcaaaatccataccgtgcagcggctcatcgccaaccggtatgccacctcgggcagctgcgcgttcttccgcatcacatgcaacgtgttcgacggcgtgctggtggcgtgcgtggcgtcgctgcttgatgcgccgatctggctgcagctgctgtgcggcttcctgttcgcgctgatcgtcggcatcgtctcggtgctggtccgcccgcggtccgcgggagccagcaagccgatcgacatcatgctcaatttggcgggactggtcaggttcgccaccgcgatcacgccgtttgcgaaggcgggcgagcagaagggtcagaagcgtcgctccaaggaatcggacctgtccgacgacgaggagctggagaagattcagctcgaacaggggcgtgccaccatcgaccgcttggtggaggccaatgatttcgatccggaagtctccgagatgctgcgcaacgtgctgacgttgtcggagacgctgacccgcgagatcatggtgcctcgcaccgacatgatctgcatggaccgcacggccacacttgccgacatgctgcgtctgtgctcccggtccggtttctcccgcgtgccggtgatcggcgacgacgtcgacgatctgatcggcgtggcgtatctcaaggacgccgtgcgcgccacggcgttcaatcccgccgcctcgcagcgcgatgtcgcctccattgtcaggcagccgatgctggttcccgagtcgaagccggtggatgacctgttccacgccatgcagcagacccggcagcatgtggcgatcgtcgtcgacgaatacggcggcatcgccggactggtcaccatcgaggacaccatcgagcagatcgtcggcgaacttgaggacgagcacgaccgcacgcagcattccgagcccgagaagatcggcgaacgcaagtggaagatgccggcgaggactcccatcgccacccttgaggagatgttcgagatcgacatcgacgaggacgacgtcgacaccgtatatggcctgctcaccaagctgctgggccgcgtcccgatcgtcggctccagcgcggtgacgcgcggcctgcgcctcaccgccgtcgacacggcaggccgacgcaagagggtgtcgatgatcgtcgtggagccggcggccgggtcgcagggtcccgcagccgacgacgatgagccccgcagcgacgaacaggacggcgagtccgcctccccgcaaggcaaatgacggagccgtccgcccaatgacaaggtgaaccgctaccgtagagaaacaatgaccaaaccgaacgcgaagaaaaggcatgacacgaatatgaccaatactgacgagcaggaatcccagccggcgtaccgttccggattcatagcggttgtcggcagaccgaacgtcggcaagtcgacgctgatcaacgcgctgatcggcaagcaggtggccatcgcctcatcgcgcccggagaccacgcgaaaggcgattcgcggcatcctcaccaccgaccatgcgcagctcgtgctggttgatacgcccggcatccaccgccctcgcacgctgctcggccagcgtctcaacgacatcgtcgaggaatcgctgtcggatatcgacgccatcgcgttcctgctgcccgccgaccaggagatcggccccggcgacaagcgcatcctaagccgtctgcgcaccgatttcgccaccaagggcgaggacgggacgttcgcgtggaaggttccgctgatcgccatcgtcaccaagatcgaccagctgggccgccagcagctcatcgacaagctgatcgagatcaatgagttcgctgacttctccgacatcgtgcccgtcagcgccctgggacacgacaatctcgacgaggtccgccaggtgctgatcgacaacacccctgaggggccgcagatgtacccggacgaccaggtcagtgaggagcgtccggaagacaccatcgccgagctgatccgcggcgcgttcctcgaagagcttgatgacgagctgccccattcgctggccgtcgtcgtggactccatcgaacggcccgaagacaacgagagcgggcagtcatacgaaggcaagatccaggtcatggtctccgtgtacgtggagcgcgactcgcagaagccgatcatcatcggacgcggcgccgagcatctggtgcgcgtcaagaagaagctgcgcaccccggtcaaccgcatcgtcggaggcaaggccaagctcgatctgcatgtcaaggtcgccaagggctggcagtccgaccccaagcagctggagaggctcggcttctgattgcgcgccgcgcgggcgttggcaccgataaaacggcgtgaggcgggtggttcaacaatcgtgttgaaccacccgcctcacgcgtgaaggatgtcgagcgtcacttcttcttggtgtacatctgcgtgttcagcagtgtggcgtaacgccggatgaccttgggtcggatcaccttcatcgatgcggtcagcaggccgttcgcctggctgaactcctcgggcaggatgatgaacttacgcaccgattcggcgcgggacacaccctcgttcgcctgatccacccacttctgcacttcggcgcgcaccgcggcgttggaggcggcctcctccatcgtcatatcgcggttgaggcccttggattccagccaggggcgcagcgactcctcgtcaagcgtcaccagcgcggagatgaacgggcgcttgtcgccgagcaccagcacctgcgagacgaactcgcagcgctggatgacctcttcgatcgggccgggggcgacgttcttgccgccggcggtgatgatcagatccttcttgcggccggtgatgtacaggaagccgtcgttgtcgagcctgcccaggtcgccggtgcggtaccatccgtcatcggtgaacgagccttcggtcgcctcctcgttcttgtggtacttcgggaacaccgcggtgcccttgacctgaatctcctcgtcctcggcgacacgcagctcgaacccggggaaggcgatgccgacggaaccctgatggtacggcacgccgagcgggttgaacgcgcacggcgcggtcgtctccgtcagtccgtagccctcgtacacgggcacgttcgcgccgcggaagaacgcgagcagttcggggtccagcggggcgccgccggcgacgatccactgggcgcggccgccgagcacgtcgcgcagcgtcttgtagacgatcgggtcgaaggcggcgcggcgggtcttggccagcacaccgaccttgcccttggcacccagctctttcatgtagttctgcgcggcgaccaccgcggcggcgaacgccacgcccttcggcccgtggccggccttctgggacgccgcgttgtacaccttctccagcacgcgcggcacgacgatcatcacggacggccgggcgacctgaaggtcggcgatcagcgtcttgataccctgggcgatgtagatcctgatgttgctcgccacgcagatgtagttgattgcgcgggcgaacgagtgcgcctgcggcaggaacagcagcacggagttcttcttgttgtgcagcaggtccggcatgtagacgggcaggttcagcgcggtcgtgcagtagtgctcgtgcgtcatctccacgcccttgggtgccgccgtggaacccgacgtgtacacgatggagcacaggtcggtcttcttgatcgagtcgatgcgctcgtcgagctcctcgtcgctcaccgcggtcccgtacgccttgatctcctccaggccgccggtctcgatgcacaggatggtctccagcgacgggcattcctcgatcgcgccctctgccttgtcgcgcatgtcggcggtcccgacgatcagcagccgcgcgtccgaattgttgacgatgttgcggatctgctcggcggagtcggtgtcgtagatggtggcgagcacgccgccgcaggccatgaccgcagcgtccgtgacatcccacgcgtaggaggtgcggcacatgaacgccacgccgtcgcccttcttcagcccgtagtgcagcaggcccttggcgacgctgcggatgtcggcgagcgtctcgttcgctgtgctggtgacccacttgccggagtcgtccttgtaggtgtacagcggctcgtcgcccatgcgttcggcgcggtccgcatagatgtcgtagatggacatgccctcgtcaagtggcgggttgccctcggtcttcgtggtgagcaggcccgtcgtgctgtcgatcagcgtcgtggtcgggtatcctggcccccattcggcggtgttcgggaggctgacctcgccgttcgcggcaagagcgtcgttctccgcgtaatccgggccgttggaggaatcgtcgccgatcgggtgcgcgaagtcacctcccaaacgaagtgccttctgcgtgatattcgcagcttgttgtcttactgaggtgaacaatgacacgtgacgctccttggaggcctgataatgcttaacacataaatattacccgtaaaaacgcctcttttcaccttacggtagcgtaggaaacagcgtcgtgcgggtcgcccgctcgcccgcggccattcgtcaggtgaaacggaacgcgccaaaagtcgattccttcggtacacttgcaacggtaagcaaagaacgcttgagttcgacgaagaaagggctctcatggctgaaacccagaaagccaccgtggtgttcggtgtcctcaacgagacatcgcaggacgaaacccgcgtcgcattgacgccggatatcgtcacgcggttgaagaaagcaggtgtgtcctgcctggtgcagagcggcgccggaatcgccgcacaatataccgacgatgattacgccaaggcgggggccgaggtcgtcgccgcggacgatgtgatcgcgcgcgccgacgtgctcggattcgtggaccgtccgtctgccgagacggtcgcgcggctcaaggccggcacgtgggtgatcggcatgctcggctcgttcaccgatgccgcgtatgtggacgccctccaggcggccggtcttgtcggtgtcgcgatggagaagctgcctcgccagctcagctccgcgcagtccatggacgagatgacgtcccagaattcggtcatggggtacaaggccgcgctggtggcggcgaacgcctatggctcgttcttcccgatgatgacgaccgccgccggcacgatccgcccggccaaggtgctgatcctgggcgcgggcatcgccggcctgcaggccatcggcaccgcccgccgtctgggcgccgtggtcaccgcgtacgacgtgcgtcccgcttcgcgcggcgaagtggagtcgctgggcgcgaagttcctcgatctcggtctcgacttctccaaggggcagggcgagggcggatacgcccgccagctcagcgccgaggagcaggccgcccagcagacggccgtcgaccagaaggcagccgggttcgacgtcatcatcaccacggccaaggttcccggccgcaagcctccgatgctgctgaccaaggccggcgtggacggcctcaagcgcggtgccgtcatcgtcgactgcgcggccagcgacctgggcggcaatgtcgagggatcccgcgtcggcacgcaggtgaccgatgggggagtgaccatcatcggtgccccgtatctcgccagcgaggtttccaacaccgcctcgaacctgctcgcccgcaacgtgggcgacgtgctcgcccacttcgtgcatgacggtcgtctgagcatcgacctgaacgaggaacttgacgacgccctcatcgtagccggacgtcccgccgcagaaagcaaggaataatccatggacatcatcgttgccatcacactgttcatactcgcgctgctcatcggcgtcgaggtcatcggcaaggtgcctgccaccctgcatacgccgctgatgtcgggcgccaattccatccacggcatcgtcatcgtcggtgtcgtcatcgtcgccgcgcacgccacctcgctcctggcctgggtgttcatcttcctcgccgccgtgctcggcacgatgaacgtcgtcggcggttacgtggtcaccgaccgcatgctggagatgttcaagtccgacaaatcgaagaagtccgccgacaagaatgaggaggccaagtaatgggtacccttgctgaagtgctgagcaacccgcttggcgtcgttgaatggttcgtgtatctgctggccgccgtgttgttcgtcgtcggcctgcacatgatgaactcgccgaagaccgcgcgcaagggcaacctgatctccgcggccggcatggtcatggcggtggttatggcgttcatcgtgctgttcgtcaccgagatcggcaacggcttcgagcatctcgtcgccgtcgtgctgctgatcgtcggcatcctcatcggcacgatcgtcggcgtgtggagcgcgaagaaggtcaagatgaccgacatgccgcagctcgtctccgtgttcaacacggtcggcggcggcgcggcggccctcgtcgcgctcaacgacatcctcacctccgaggagctgccgacgctggtcgtgctgatcaccgccggactcggcatcatgatcggttccgtcacgttcaccggctcgctgatcgccgccggcaagctgcagggcgtcaagttcctgcgcaagctcaccctccccgcgaagggcgtgtggaacatcggcttcattgtgctcaccgtcgtctcgttcgtcatgctgtgcgtgcagcccgagcagcgtctgctgtggtgcgtgctgaccacggtgttctcgctgtgctacggtctggtgttcgtcatcccgatcggcggcgctgacatgcccgtcgtcatctcggtgcttaacgcctgcactggcaccgccgtcgccatgagcggtctggcgatcaacaacatcgcgctgatcgtcgccggcgcactcgtcggcgcggccggagtcacgctctccctggcgatgtccaaggccatgaaccgtccgctgatgagcgtgctcgccggcggcttcggcggtggcgcctcggccggcggcgacgccgacggccccgagggcacgatgaaggagaccagcgccgatgacgtcgccgtgcagctggtgtacgccgacaaggtcatcttcgtgccgggcttcggtctggcgcaggcccaggcgcagcgcgagctggccgatctgggcgacctgctcaagggtcatggcgttgaggtgtcgtacgcgatccacccggtcgcgggacgtatgcccggtcacatgaacgtgctgctcgccgaggccaacgtgccgtacgaggagctgatcgacctcgacgacatcaacccgcagttcccgtccgccaacgtggccctggtcgtcggcgccaacgacgtgaccaacccggccgcgcgtcgccccggcaccccggtctccggcatgccgattctcgacgtcgacaaggcgcagaacgtggtcgtcatgaagcgcggtcgcggcaagggctatgccggcatcgagaacgagctgtacttcgagcccaatacgcagatgctgttcggcgacgccaaggccggcctgcagtccgtcatcgccgccgtgaaggagctcatctcgtaaccgtcaccgcactcggcccgccgggccgaacggagcgaaacgatatgggagtgggtccgctggaaatccatccagcgggcccactcccatatccatatcggttccgtcggcgcatggcggctgcggccgggaagctgccgtcagagtccgaacacgcgggtgacgaaattcgtcaccgtcttccagtacaccaccggtgccgtgctggcgctcatggaatgacctgccgagggaatcagcagtttctgccggtcgatgctcgcgcaggcgtcgaagttctcgtccaaagccctggacggcacgaaatcgtccgcgccgccgtggatgaacagcatcggaatcgtggcatgcttcagctgttccacgcacgaggcttcctggaaaccgtacccggcacgccgccgcgcgatcgcccccatcgtcgtcacgatcggcttggcgaggaacttcggcaggtgaaacatcgaccgcgcgcagtcgatgaactgctggccgaccgacgcatagccgcaatcctcgaccgccgccacgacgttcctgggcaggtccggctcgccgacggtcatcatgaccgcggccgcgcccatggacttgccctgcagcaggatgcgggcgtccgcgtcgctgccgatgatcagcgatatccaccgcatcaggtcacggcgatccagccatcccatgcccgcatagcggccttcgctgagcccgtggccgcgcagcgccggaaccagcacggtgaacccgagacgggcgaaacgatgcgcgtacttcgccatatcctgcggttgccccgaatacccgtggcagcatatcgcatacaggtggggcttcgcaccggcgcaatcgggatcgaacagccagccatgaagctggatgccgtcctccgccgagatgaccaccggctgcttggactggtcgaaccaatccgccgcctcgacctcttcggccgcgtcgaggcggggtcccttgtccgcgactttgccgtcatccctgccggatctgagcatcgagtgcttcgcctgtgcatccagcgcatacgagaacatgagattcgccagcccgtaagtggcgccggctaccacggaggccgcgattccgcctccaactactatccgtgatgtgttacgcgccattgcaaacctcccagctgattcggtgcatgtcccattgcgtccattgtagggcctcgccggggtcgatgacggcatgacgacgaaacagccgggcggatcgggcgttcgattcgtttgccgggatagacgttccatcgaatgtcccgcgcggccgtataattgtttctcgttgctttggcgagggcattccgattcgcgagaacgggtctgccgtaatcgactcggcgttgaataccacccctccttggggagttctgcggcgcgtcgtggcgtcaaatagacagaacgacaagtaacactcaaggagaaccattatggcaaacaccatcaagatcgccggtgacatccgtgacgaattcggcaagggtgctgcgcgccgcatgcgcgtggccaagctcatccccgccaccttgtacgcgggcggcgaccagccgacgttcgtgaagctcccgatgaaggagaccacgctggccctgcgccacacgaacgcgctgttctcgatctccttcggtggccagaccaagctggccgtcgtcaaggatgtgcagcgcaaccccgtcaagcgcatcgttgaacacatcgacttctacgaggtcaaggccggcgagaagatcgacgtcgaggtgccggtgttcgtcgagggcacgccgaagggtgccgccgtcgcgttcgtcgacctgcaggagctcaaggtccgcgccgatgtcaccaacctgcccgagcgcatcgtggtcaacgttgacggcctgaccgacggcaccaaggtgctgctcaaggacgtcgtgctgccggaaggcgccgagctcgacatggacgatccggagacctccgtcgtcagcgtcgaggtgcctgaggacaccaccgagtccgctgctgccgctccggccgctgacgccgatgccgctgctgccgctccggccgccgatgcggacgccaagtgatccgtctcgcacagcacatcggattcccgcgtgacacacgggagtgacgcttgagaaaagcccaccacaagcgtgggcttttttcataatgtgaacgagctcacgccgaatgcgtcatcggtgtgagaaagtatccctcagagccggtgccagaagcgccgactgccccatctggccgccgtgacgcaaacggcgacgttatcaaagaagtggttatgacagaaaacaatcatcacgattccgccgcgctggacaagctcaccgagccgttcaccgtgctgccgaacgacaatcccgcatccgacgcgaagcgccaggagctcatcgacaagccggcattcggtcaggtcttctccgacaacatggcccacatgagctggaccaagggcgagggctggggcgaccgtcgcatcgagccgtacgcgccgctgaagctggatccgggcgcatccgtgctgcactacgcccaggaggtcttcgaaggtctgaaggcataccgccacgccgacggctccacctggctgttccgcccggacgcgaacgccgagcgtttccagaactccgccaagcgcctgtacctgcccgagctgtccgtggacgacttcctcggctccgtggcggccctcgtcaagcgcgacgtcaactgggtgcccacccgccgcgagtacacgctgtacatgcgtccgttcatgttcgcctccgagccgttcctcggcgtacgtgccccgcacgaggtcgactactgcgtgatcgcctccccgtccggcccgtacttcccgggcggcgtcaagccggtgagcatctgggtggaagacaagtggttccgcaccggccccggcggcaccggcttcgccaagtgcggcggcaactacgccgcctcgctgctcggcgaatacaccggcatcgacaacggctgcgagcaggtgtgcttcgtggacgccgccaccaagacctaccttgaggagctcggcggcatgaacatgatggtcgtgcacaaggacggccacgtggagaccccgtccctgaccggcaacatcctgccgggcgtgacccgccgttccctgatccagctcatgcaggatcgcggcatcgacgtggtcgagacgatgatcaagctcaccgacctgctcgacgacatcaagtccggcgaggtcaccgaggtgttcgcctgcggtaccgccgccatcatcaccccgatcggccgcttcaagtccaaggagttcgacgtgaccgtggccaacggcgaatccggcaagctcacgatcgacctgcgcgaccagctgctcggcatccagctcggcgaggtcgaagacccgcacaactggatgtggaaggtctgctgagcgcagtccagttctacgtgaagccccgcccatcggctcgatcgagcccggcggggcttttcgtatagaacccgctcccgctggcgggagctgtcgagcgtagcgagactgagggtggtttttatatgcccataaggattgcctgcggcagctgcgttgccgtcatctgcacgcggccatcggcaaccatgatgactggtggatggacaacaagccggcgctgaacctgttcgagagcatcgaaccgaacggcaccgttgaactggaaggacttggaacggtcaacctgtcgcacttcccatatcgcgaagacctcgcgtacggatggcccgatgacgcggtccgattccacgatcaggcgctgccgttcgacggacgcaagctgctgtacggtcacacgcatcagctgtctgccgcgggtgcacggccggaatcgctcaacgtcaattctgcgcggactgccgggctccggtaagtcgacatgggcgcagaactgggtgtccgaccccgccaacacgtggccgcattgcgtgatctcgctcgacgccggctgggatgtggtcgccgacgcgcagcatgcgaacccggagtatgcgaatgagctggcgcggctcgccacacggcacggggcaatctggcggacggaggatttcgacgtgcccctggacgagctgctgcgccgcaacgaggcccggccgcgcgccgaccatgtgccggaggagtacatccgctcgtcgtggaagcggttccaccacgtgatgttccgcccgctcaatcccgaagacccgaacggcaacctgcttaaacgcatgatcgccgacccgtacgtccgggtcacaccggtgcgcggcgagagcgacgtattcgcctgcaatttcactcgagaggcgttcctcgaaggacgttggaacacgcgcacgatcaacgcccgcgggctctgaagtatgacacggtggtcgcgcacggcgacacatccccgggatcgttccccgtgcgcgtggagcgcaaggagaacggcatcgacctgacctatgagcgacagacgttcaaggaacgcgacatcggatcaaggtcggcgagatcctgacccggatcggagccgattctagtttcgggtagccggcttgcggtaggctcatgtacggccggatggttgtgatgttggcgaggagtggcacgtggaggaactggcactggaaagcaatgcctttttcatgggcatcgaatatcttgcggtgttctgcagcgggctgatgggcggtctatgcgcggttcgcaagaactatgacctgttcgccatgctgatcaccgcgtggctgaccgcgttgggcggcggcatcatccgtgacgtgatgctcggctccctgccgccggtgggcatctccgaccgcgggttcgtgctgaccgcactggtgtcgggcctggctatcgccgtgatccatccggaagtggacaagctcagatggtcgatgctgaccatcgacgccttggcggtcggcttgttcgcggtgaacggcacctcgaaggcgctcgatttgggaacctccggcatgacggcggtgttcatgggcatgttcaccgcgctgggcggcggtctggtccgggacatgctcctgaacgacgtgccgatgatcatccgcgacaagcacctgtacgcggttccttccgcggtcggatgcgtgctcaccgtgttcgtgtgcaggggagtgcaatggaagatgctggatttcacggccgaggtggtgctcgactgcgcgatcgtcgtgctggtcgtggtcatgcgtctgctgtcggtcaagttcagcatcatgcttcccggtgcggtcaagcggcacaacacgtatcttcccagcgagtcgcggtatctgaaacgcccggtcacccatcccgatgcccacgatggcggcgatgacgacaaagaccagtctcgggcttgacgctttcggaccacccccacccgcttcgcgggagcccccgctggcgggtgggggtggccggctaacacgaaagaacccccgggaaccttgcggttccgcgggggtcttatgctgtgacgaccgtcagacggtcatgctcacatgttgttgatggcgactgccatgcccgacttgcggttggcggcctggttcttgtgaatcacgccagcgccagcggccttgtcgagcttctgggaagcgaccttgtaggcggcttcggcagcggccttatcgccggcggcgatggcctcacgggttgcgcggatggcggtcttcaggctggacttgacggccacgttacgcttgtgcgccttctcattggtgagcacgcgcttcttctgcgacttaatgtttgccacgttttctccaaacgacgtttgctataaggacatacagggagtcatgctaccacgatgttcggataaaaccgaccccgtgttccgtgtgtcgtcgggaaattgccgacggtgaccggtaaacttagtgacttgcggcacatggcgtcacatttacgatgccaaaggcccgcgacgaacgagcaccacggacgaaaggaaccggatcagggtgattgagccgaagaacaagccagggtttaccgatcagtcgctaatccggaatttctgcatcatcgcacacatcgaccacggcaagtccacggtggccgaccgcatcctgcaactgagcggcatcgttcctgagcgcgagatgcgtgaccgcttcctcgaccgcatggacatcgagcaggagcgcggcatcaccatcaaatcgcaggccgtgcgcgtgccgtggaccttcgagggcaccgagtacacgctcggcatgatcgacacccccggccacgtggatttcacgtatgaggtgtcgcgcgcgctggccgcatgcgagggcgcggtgctgctcgtcgacgcgacgcagggcatcgaggcgcagacgctgtccaacctgtacatggccatcgaccacgatctggccatcatccccgtgctcaacaagatcgacctgcccagtgccgagccggacaagcacgcggaggagatcgcgggactgatcggatgcaagccgagcgacgtgctgcgcgtgtcgggcaagaccggcgaaggcgtcgccgatctgctcgaccatatcgtcatggagattcccgctccgcacggcgacccgaaggcgccggcacgtgcgctgatcttcgactcggtgtacgactcgtaccgcggcatcgtcacctatatccgtatggaggacggtgagctcaagtcgcgtgagaaggtgcacatgatgggcatcggcatgacgcacgagcccatcgagattggcgtcatcagccccgacatgacccccaccaaggcgcttggcgccggcgaggtcggctacatcatcaccggcgcgaaggacgtcagccagtccaaggtcggcgacaccgtgacctccgccgtccgccctgcagccgaggcgctgcccggctatcgcgacccccagcccatggtgtacgcgggtctcttcccgatcgacaacgcccagttccccgaactgcgcgacgcgctcgacaagctcaagctcaacgacgccgcgctcatctacgagcccgagacgtcggtggcgctgggcttcggcttccgatgcgggttccttggcttgctgcacatggagatcgtctcggagcggctggaacgcgagttcggtctcgacctgatctccaccgcgccgaacgttccgtatgaggtgaccgccgaggacaacaccgtgcaccgggtgaccaacccgagtgaattcccggacggcaagatcaagaagatcgtcgagccgatggtcgctgccgacatcatcacgccgaaggatttcattggttcggtgatggacctgtgtcaggaccaccgcggcatcatgggcacgatggaatacatctccaccgaccgcgtggagatgcactaccgcatcccgctcgccgagattgtgttcgacttcttcgaccagctcaagtcccgcaccaagggttacgcgtcactcgactaccatgaggacggcgagcaggccgcggacctcgtcaaggtcgacatcctcatccagggcgagaaggtcgacgcgttcagcgccatcgtgcatcgcgacaaggcatacagctacggcgtgatgatgaccaagaagctgcgcgagctgattccccgccagcagttcgagatcccgattcaggcggcgatcggatcgcgcatcatcgcacgcgagaacatccgtgcactgcgcaaggacgtgctcgccaaatgctacggcggcgacatcacccgtaagcgcaagctgctcgaaaagcagaaggccggcaagaagcgcatgaagatgctcggccacgtcgaggtgccgcaggaggcgttcatcgcggccctgtccaccggcgaggccggcaacgaccgcgacaccaaggataagatccgcgccgcgcagaagacggaaggctgatggaggtctttgatatgcccccgctggcgggggctgacagccgaaggctggctgggggtggtccagcgaatgaccgccttcagccggctacgccgacaacccccgccaacgcgggcgatgcggcaggctacgaaatctacatccatgtgccgttctgcatgcggcgttgcggctactgcgatttcaacacatacacggccacggacatgggcgcgggcgcgtcccgcggcaattacgcgaacatggtggtgcgtgagatgcgtctcgtgcgcgattggcagctcgtgcacggcatcgaggagccgcccgtctccacggtgttcttcggcggcggcacgcccactattctgccggcgcgcgatctggtaatgatgctggacgcggtccgcggcctgtggggcatcgaaccggaggcggagatcaccaccgaggcgaatcccgacacggtcgacgagcgctatatcggcgcgctcgcggaaggaggggtcacccgcgtgtcattcggcatgcagtcagccgtgccgcatgtgttgaaaaccctcgaccgcacgcatacgcccgccaatgtggaggccggtgtcagggcggccgacagggccggcctgcgctccagcgtggacctgatctacggggcgccgggggagagccttgacgattggcgagactcggtgcgcacggcagtcgatcttggcgtgaaccatgtctccgcctatgcacttaccgtggaaccgaccacgaagatgggtcgacagatcgcggcgggcacattgcccaagcccgacgatgacgacgaggcagcgaaatacgagatcgccgatgacctgttcgccgcggcgggcctagaatggtacgagatctcgaactggtcgcgcccgggctatgagagccggcacaatctcgggtattggcgcaacgtcgactgggccggcctgggccctggagcgcacagccactacaacacggttatgggcagctccacagacggtgccgccgcgaacagcgacgccgctggagacgtttcgacttccgtaacctccacatcgatgcgcggttgggacatcgcgcatccgcgcatgtgggggatggccatcaacgacgggcgtgtgccgtggtcgggcgatgagaccatatcgcccacggagaaccttgaagagctcatcatgcttggcctgcgcattcgggaagggctcgacatcggcctcgtcaatcggcatatcgaagcggtgaaccgggcgcaggatgcggcgcagggaacgctgcgcatcatcgacgacgcgtgcctcatgccgctggtcggggatggcctcatcaccctcgacccgacgacgggccatgccgtcgccacgaggagaggccggttgctcaacgacgccgtcatcgagcgcatgttcggcgcggtcggcctgtagtggctccggcagtgaaacgtcgaagcagaccttgaccgtgccgaacttcaccttgctcacgatggagaatgcgtcacccaggctatgctggagatcggcgaggttccgaggtcgcttttcgtgatgagtgcgatgccgaaggattcgatggcgattcccgccagaaagcatatcagccgcttgatggaatacggcatgaatcatgactcctttcgtgtgttctgcccgatgtagtgctggaaggcaggtcgacgggatgcctgttgcgtcaggcttgaagattctcgattaccttgcgcagagaacttcgcagtctctcgcgttccgccgcgttctcgtaccgtgtagcttcgctgccgtgctagcaccttttggtttgtaagcaaactaaatatgtccatcggagaaaagttcaatacagataaaattgaacttaggttgtttcgctgacaaagccgtgatattcttttgaaccagaatttgaactttgaaccaacatgaattgaggaagtcattggagagcttcgcgacgcggctgagaaccgccatgaacgcccgtcacctcagacaggtcgacatcgtgcgtgccgcccaggcgtcaggtgtcaaactcggcaaaagccacatcagccaatatgtcagcggcaagacgacgccccgcgcggatacgctcaggttcctcgccgatacactgcaggtcgacgagcaatggctgctcggccatgatcgcggacggcccggcatgccggcgcagccgaaacgggtgccggacaatcccggcggccgggccgacgcgccacgcacgccatcatcccaagcgtccgcaccccagacaacgtcaccatcacacgaaccggaaggaacacccatgcgccacttcaacaaatccaccaaacttgacaacgtgctgtacgacgtgcgcggaccggtcgtcgacgaggccgcccgcatggagcagtccggcatgcacgtgctcaagctcaacatcggcaaccctgcgccgttcggcttccgcacaccggacgaggtcgtatacgacatgtcccggcagctcagcgacacggaaggctactccgcgtccaagggcctgttctcggcgcgcaaggcgatcatgcagtacgcgcagctcaagaacctgcccaatgtcggcatcgaagacatctacaccggcaacggcgtcagcgagctgatcaacctgtcgttgtccgccctgctcgacaacggcgacgaggttctggtgcccagccccgactacccgctgtggaccgcctgcgtcaacctggccggcggcaccgccgtgcactacgtgtgcgacgaggaatccgaatggtacccggacatcgatgacatgcgcagcaagatcaccgaccgcacggtggcgatcgtcctgatcaacccgaacaatccgaccggcgccctctacccgaaggaggtgctgcagcagatcgtcgatctggcccgcgaacaccagctgatgatcttctccgacgagatctacgaccgtctggtgatggacggactccagcacgtctcgatagcgtccatggccccggacctgttctgtgtcacgttctccggcctgtcgaagtcgcacatgatcgcgggctaccgcatcggatggatggtgctcagcggcaacaagtccatcgcgaaggactatgtcgagggcatcaacatgctcaccaacatgcgcatctgctcgaacgtgcccgcccagtcgatcgtgcagaccgccctcggcggccaccagagcgtcaacgactacatcgtgcccggcggccgtctgtacgagcagcgcgaatacatctacaacgcgttgaactcgattcccggcgtcaccgcggtcaagccgaaggccgcgttctacatcttccccaagctcgacgtgaagaagttcaacatcactgatgatgagcagttcgcgcttgacctgctgcatgacaagcgcatcctcatcacgcgcggcggcgggttcaactggcatgagccggaccacttccgtgtcgtctacctgccgcgcatcgaagtgctcaaggacgcgacggaaaagctcaccgacttcctcagctgctaccggcagtagtcggcgggcatcacaatacgggtcgaaaaagccgttatccgtgattccccgtgtgaaatcgccgttttgaggctccgaaacggcgatttcacacacccaattgcggataacggctttttcgacccgtaattcgcaaaccggagaggggctcgaggctccccgccgtcacgtcctcgccgccgataggatggacgctatgaaaaagcacatcgtcgcgggcattctggctcatgtggacgcgggcaagaccacgctgtccgaagcgctgctctaccgttcggggcagattcgcaggctcggccgcgtcgatcacggcgatgcgttcctcgacaccgacgcgatggagcgggcgcgaggcatcacgatattcgccgagcccgccatcatccgatccggcgatctgacgatcaccctcatcgatacgccggggcacgtcgatttctccgccgagaccgagcgcgtgctggcggtgctggattacgccatactggtggtgtccggggctgacggcatccaggggcataccgagacgctgtggcgcctgttgcggcgatacaacgtgccgaccttcatattcgtcaacaagatggacgcgcccggtgccgaccgggccgcactgctcgcccagctgcgtgacaggttctccgacggctgcgtggacttcgagaacggcgctccgacccggtcgatggaagacatcgcgatgctcgacgaatcggccatgaacgagttcctggactccggcgccgtcgcggacgagcggctgaaagccatgatatccgcgcgctcactgttccccgtgttcttcgggtccgctctcgccatggagggcatcgatggcttcctcgccggctttgaacggtataccaaggagatcgaaccgggtgctcgtttcggggcacgtgtatataaggtgtcgcatgacgagcatggcaaccgtctgacgtggctgcgcgtcaccgggggagagatcaaggcgaagatggtgcttgacggcgacgagaaggccgatcaggtgcgcctgtattccggcgcgaaattcaccacggtcgatgcgctgcccgccggctcggtctgcgccgtcaccggcctgacgcacagccgccccggtcaggggctgggcgaccagtgcgacgccgacgccccggtgctgcagccggtgctcacctacacgctgttgccgcagggggaggatcctcaccgttgcctgaccgcgctgcgagaactggatgatgaggaccctctgctgcatgtggtatggcaggagaggctgcaggagatccatgtgcagctcatgggcgcggttcaattggagatcatccagcagatcatgagggaccgtttcaacttgaacgtcggcttcggccccggatccatcctctacaaggagacgatcgcccatgcggtggagggcatcggccacttcgagccgctacgacactacgccgaggcgcacgtgctgctggagccgggcgagccgggcagcggactgaccttcgccacatcctgttccgaagacgtgctggcccgcaactggcagaggctcatcctgacgcatttcgccgagaaggagcatctgggcgtgctcattggcgtccccatcaccgacatgaagctcacgctgctcaccggccgcgcgcacgagaagcatacggagggtggtgatttccgccaagccacctaccgggccatccgacaggggctgatgaccgccctggtcgagggagacttctcccggcacgacctgttcgacgaggacgccgcggaggacgtcgccgaagacgcggccgtagccgatgccaaaacagcccggacggacgaatcggagccgtcggacggcagcgccttcgcctccgcggccgcccgcgatcccggctggtgccgggtgctcgaaccgtggtaccgcttccggctcgacatcccgcaggacatgctcggccgggccatgtccgacatacaacgcatgtcgggcacgttcgacccacccgagatggacggccagttcgccgtgctggcgggagtctgcccggtatccgagatgcgcgactacgccatggatgtgaacgtctatacccacggcacgggccatctggggtgcgtgttcgacggctaccggccatgccacaatgcggccgaggtcatcgaacaagcgggatacgatccgggagacgatctcgaaaacacccctgattcggtgttctgcgcgcatggcgccggttacacggtcaaatggtaccgggtgccggatttcatgcatctggatcgcgcatacgacaccgggcagtgacgtcttcgccgggcaaagggggccggcgacagtgacagtgatattcgtcacacttaacacgccattcacataagagacatctcattgacatgcgaaacgggtgccgcagattttccgaatcgcttgagaaacattgaaattgggtattgacaaacacctcgactcggtatatggacagcgaaacgtgtttgacatagccgagcggtactctttcctacgcattaacaaaagaaccgcaggttgtcaagatcctgccaaaacgatatgaaggtggtttcggtgactttccacgccccgctcgatttgagcatacataaatcacaaggtctgtacgacccaagctcagaacatgacgcttgcggcgtaggtatggtcaccacactcaacaagcggccggaacgtaagatcatcgacgacgccatcgaagtgctcgtcaatctcaaccaccgtggcgccgtgggcgccgaggagaacaccggtgacggtgcgggcatcctgatgagcatgcccgacgagttcatgcgggccaccacgggcgtcgaactgcccgaggccggccattacgcggcgggcatcgcgttcctcgaccgcgacatcgccacgtccggccagcaggagcaggccatcgcgagcatcgtgcgcgaagagggtctggaagtactcgcctggcgagtggtgccgaccaacccggacgggctcggcctgcaggcgctcgcctcgatgcccagcttcaagacgctggtcatcgccgacgccgaaggcaagctggcgggcatcgagctcgaccgcaagaccttccgcatccgcaagcgcgtcgagcatgaggtcggcatctacttcgcgtcgctgtcggcccgcaccatcacctacaagggcatgctcaccacgatgcagctcaccccgttcttccccgacctgtcggattcgcgcatgaaggcgaagatcgcgattgtgcactcgcgcttctccacgaacacgttcccgagctggccgctcgcgcagccgttccgcctgctcgcccacaacggcgagatcaacacgatccagggcaaccgcaactggctgtcagcccgcgaaggccgcctgagctccgaactgctcggcgagttcgagccgttgctgccgatcaccacgcccggctattcggattccggcacgttcgacgaatgcctcgaactgctgcacctcgccggccgctccctgccgcacgccatctcgatgatgctgccgccggcatgggagaacaacgaccagctcgaccccgacgtgcgcgcgttctacgagtacaacaacacgctgatcgaaccgtgggacggcccggccgacatcatcttcaccgacggcacgcaggtgggcgccctgctcgaccgcaacggcttccgccccggccgctggcagctcaccgatgacggctaccttgtgctcgcctccgaagccggcgtgctgccggagatcgacgacaagcatatcgtctccaagggccgtctggagcccggaaagatgttccttgtcgacaccgacgagggccgcatcatccccgacgaggagatcaagaggaaccttgcctcgcagcacccgtaccgtaagtgggtcgaaggcaactccgtggagatgagcgacctgccgcagcgcgagcacgtgagccattccggccagtccgtgcagcgtcgtcagcgcgcgttcggctacaccgaggaagacctcaagatgctgctcacgccgatggccaacaccggcaaagagccgctgggctcgatgggcaacgacaacccgctgccggtgctctccaagcgcagccgcatgctgttcgactacttccaccagaagttcgcgcaggtcaccaacccgccgctggactgggagcgcgaggagatcgtcacctcgctcgaatccgccatcggccccgagccgaacctgctggaggattccgagctgcacgccaagaagatcctgatcccgctgcccgtcatcaactccgatgagatggcgcagctcaagcggctcgacaaggccaaggtgctcggcggatactaccgtccgttcgtcgtcaagggcctgtatcaggtggccggcggcggcaaggcgctgggcgagcgccttgaggagatctttgccgaagtcgacgaggccatcgcgggcggcagcaacttcatcgtgctgtccgaccgtgattccaaccacacgtggggcccgatcccgtcactgctgctcaccagcgccgtgcagcaccacctgctgcgcaagcacacccgcacgcagatctcgatggccgtcgaggccggcgatgtgcgtgagatccatcatgtcgcgctgctgatcgcatacggtgccgcatgcgtcaacccgtatctggcgttcgaatccgtcgaggacctggcccgcaccggctacctgaaggtcgacgagcgcacagccgtgaagaacctgaccaaggcgctgtccatcggcgtgctgaagatcatgtcgaagatgggcgtctccaccatcatgagctaccgcggagcgcagctgttcgaggcggtcggcctgagcaaggacatcgtcgacaagtacttcaccggcacggtctcgcaggtcggcggcatcgggctcgacgagctcgccgaggaggtggcgattcgccaccgcgtggcctacccgaaccagtggaccgccaccccgcacatgaacctcgaaaccggcggcgaatacaagtggcgccgcaccggcgaggatcatctgaacgaccccgaggcgattttcctgttgcagcagtcaaccgcgcgcggcgactaccagatgtttaagaagtactcgcaccacatcaacgacacgtcgaaccgcattatgacgctgcgcggactcatgaagttcaagcacgaccgcaagccgatcgacatctccgaggtcgagccggcctccgagatcgtcaagcggttctccaccggcgcaatgagctacggctccatctcgcaagaggcgcacgagacgctcgccatcgccatgaacacgatcgacgcgcgttccaactccggcgagggcggcgaatccgacgaccgcatcgaggatccgctgcgttacagccgcatcaagcagatcgcatccgcccgcttcggcgtcaccagcgattacctggtgcacgccaccgacctgcagatcaagctcgcccagggtgccaagcccggcgagggcggccacctgcccggtgccaaggtcccgccgtggatcgccaaggtccgtcacgcgacccccggcgtggagctcatctccccgccgcctcaccacgacatctactccatcgaggatctcaagcagctgatcaacgatgcgaagatggccaacccgaaggcgcgcatccacgtcaagctcgtctcggagttcggcgtcggcaccatcgcggccggtgtggccaagtgccatgccgacgtggtactgatctccggctatgacggcggcaccggtgcggcgccgctcaacgcgattcgccacgcgggcaccccgtgggagatcggcctgtccgaaacccagcagacgctgattctgaacggtctgcgctcccgcatcgtcgttcagtgcgacggcgagctcaagaccggccgcgacgtggtcatcgccgcgctgctcggtgccgaggaattcggcttcgccaccacggcgcttatggtcgagggctgcgtcatgatgcgcgcgtgccagaagaacacctgcccgcagggcatcgccacccaggatcccgagctgcgcgcccggttcaagggcaagccggaagcggtcatcaacttcttcatgtacatcgccgaggaagtgcgcgaactgcttgccgagctcggtttccgtacgctggaggaggccgtcggccatgtcgaatgcctggaccagaacgaggcgatcaagcgctggaagtccgacggcatcgacctgagcaacgtgctcatgcagcccggcccggttcccggaacgattctgcaccagaccatcgagcagaaccacgaactggagaaggcgctcgacaacaagctcatcgagatggccgaacccgcgctggagcgcaaggagccggtacgcatcgagatgccgatccgcaacgtcaaccgtacgctcggcacgatggtcggctacgagatcacccgccgctacggtgccgaaggactgccggacgacaccatcgacatgacgttccacggtgccggcggccagtcgatcggcgcgttcatcccgcgtggcgagaccatccgcgtctgcggcgaggtcaacgactacgccggcaagggcctgtcgggcggacgcctgatcgtacgccccgaggacggcgtcaccttcgacccgcacgagaacgtcatcgcgggcaacgtgaccggtttcggcgcgacctccggagagctgttcgtggccggccgtgcaggcgagcgtttcggcgtgcgcaactccggcgccacgttcgtggtcgagggcgtgggcgaccacggctgcgagtacatgaccggaggcaccgtcgtggtgctcggctccatgggccgcaacttcggcgccggcttctccggcggcaacgtgtacgtgctcgatctggacatgaaccaggtcaatccgaccgcggcgaaggacggctcgctgctgttcctaccgctggacgacgaagcacaggcactggtccacgatctggtgaagcgtcacgtcgaagagaccggttccgcattcgccgccggactcctcaaggattggaagcacaccgtcgcccggttcacgcacgtggtgccggaacactatctggccatgaccgccgccatggcgaaggccgaggaagacaatatcgatttcaacacgcccggcgcctgggaacaggtgtacgagcaggtgatggaaggagcgcactgacatgggagatcccagaggattcctgaaggtccgtacccgtcgcgaactggcggaacgccccgtcgaggagcgcatcaaggactggcttgacgtccatgctgagtccggcttgcagccgtggaccgccgaacaggccgcccgctgcatggattgcggcactcctttctgcatgaccggatgcccgctcggcaacatcatccccgagttcaacgatctggttcgtcaggagaagtgggaggacgcctacaatcgtctgtccaccaccaacaacttccccgaagtgaccggacgcatctgcccggcactgtgcgagaaggcgtgcgtgctcggcatccatcagccgccgacgatgatcaagctcgacgagcagacgatcatcgaccaagcatggggtctggatatcgtcaagcccatgcctccgcagcgtctgaccgaccagaccgtggcggtcgtcggatccggccctgccggtctggcatgcgcccagcagctcacccgagccggccacacggtcgtcgtctatgagcgcgatgacgccatcggcggtctgatgcgctacggcatcccgaacttcaagctcgacaagcgactgatcgaccgtcgtatcaagcagatggaggccgaaggcacccgcttccgcacgggtgtggagatcggcaaggacatcagctgggacgatttgcgcgaccgctatgatgccgtggtcgtcgctatcggctccactgtgccgcgtgacatgaagattcccggccgcgagctcaagggcattcacttcgcgatggagttcctgcccgacgcgacccgacgcgtgtacggcgtaaagcccgtgcacgacatcaccgccaaggacaagcacgtcatcatcatcggtggtggcgacaccggttccgactgcctcggcacctccatccgtcaaggcgcgaaggacgtgaccgtgctgcagatcatgccgaaggagccggacgagcgcccggacaaccagccgtggccgacgttcgcgcgtctctaccagaagacctcctcgatggaggagggcggcacttacgtgtacagcaccgattctgtcaacttcgtcggctccgacgaggaacaggcccgtgtgcacattgaggattccaccgcgtccgaaggattcgtggccgacgagaacggccacgtcaccggtctgaaggtcgtggatgtggcaccgggggagaacgggccgttcacccgccagcccggtaccgaacgcgtgctgcccgcggatctggtgctcatctcggtcggcttcctgcacccggacacctccacgctgctcgaccagctgcctgtcgaattggacaagcgcggcaacgtggcccgcaacgacaagttcgccacctctcaggatggcgtgttcgttgccggcgacgcgggccgcggccagagcctggtcgtgtgggccatttcggagggccgctcctgcgcagccgccgttgatgagtacctcaccggcgtcaccgagctgcccgcgccgatcaccgcatcccagcgtccgatgatgctgccgcgatgattcgatagtccggcggttcgccgtaccgacatctactgggggcaggaagtctcttcaagggacttccggcccccagtcgcatatcgggcgttccctacttctggcgaaagtcccgtcctgttgtgtgccggtgggttttcgccggaggaatggcccgctcatgtgtgggtgagtcgcagaaggaggccggctatgtgcggggtggtacgtgtcgcggccacggctcggacgtcgtgattgccaacgattgcggatctgtctcgtcgtgcgagtcgaaccgccgctacggcacggcttggagtacagtacataggagtgttatccacaaacgagcaggagaagtaacgatgcctaaccgtgccgaacgccgcaaagcagcaaaagatcagcgtcggggagtcccgtcgcagtacgaccagacccgtggccgtgcccgatccggcatgctcgacgagtacgcgcttcaggagaagtcccgccgtattcaggagggcgtggatgacagcggcgtgtggaagcccagcgctcgcaccgaggtcgatgaggaagtggagtcggtgttcgaggccaacccgaactatcaggatcccaaggcgttcaaggcaccgcactccgtgcggcagtggttccgtgtcggcagctggacgctgatcgcgctgtcggtcatcgcgttcttcgtggtgatgtggctgcccacgcatccgctgtggctgatcctgaccgtgtccgtcgtgttcgtcgtcggcgtgctcagcctgttcttcacggccggcaactaccgcaacaacccgaacctggacgccaacggcaccgcggtgtgagagtctggtatccggtagttacctggtattatggcgtgttttttcgccaacacgaacatgggcattgtgcgttttttcgacgtgcaatgccctaaagttatatatggcagtagccgcaaacaaggttaccgacgaaggaggccttaatcgtgaaagttgatatcctcacccgcgaatacccgccgtatgtctatggtggcgcaggcgtgcacgcggaagagctctcgaaggtgctggccgagcgggtcgacgtgaccgtccgtgcgttcgacggaccgcgcaccgaagccgatgcacccgccatccccggagatggctcgacgaagggcagcctgaaggtcgtgggctacggaacgccctctgagctggccgacgcgaatccggcgctgaagaccttcggcgttgatctgcagatagccaacgacgtcgacgccgacatcgcccacgcgcacacctggtatgcgtgcctggccggatacctcgccaagatgctgcacggtacgccgctggtcatcaccgcacattcgctggagccgttccgcccgtggaagcgcgagcagctcggcggcggttataatctgagctcctgggccgaaaaggacgcctacgagcacgccgaccgcgtcatcgccgtctccggcggcatgcgcgaggacatcctcgccgcgtacccgaacctcgaccccgacaaggtcgtcgtggtgcataacggcatcaccatgagcgacttcgccacgccggccgacgacgacccgggctgggccgtgttcgaccgttaccacatcgaccgcagcaagcctacgctgctgttcgtcggccgcatcacccgtcagaagggcctgccatacctgctcaaggcgctgcacctgatctccaaggacattcaggtggtgctgtgcgccggcgccccggacaccccggagatcgccgaggaggtcaagaccgcgttcgccaagctcgacgaggaacgcggcaacatcatctggatcgaggagatgttgcctcgtccggagctcaacgcgctggagcatggctgtgacgcgttcatctgcccgagcatctatgagccgctgggcatcgtgaatctggaagccatggcctgtggcctgcccgtagtcgcctccgccaccggcggcattcccgaggtcgtcgtcgacggcgagaccggctatctggtgccgatcgaccagctgcgcgacggtaccggcacgcccaccgatcccgacaagttcgtgcatgacatggccgccgccatcgacaagatcatggccgaccccgaactcgccaagaagatgggccaggcgggctacgagcgagcccgtgaccatttcagctgggagtccatcgccgacaagaccgtggccgtctaccagtccgtcctcgacgagcagaacaagtaacggcgatccgacgcaggcggggacaaggaatgatgcccccgcctgcggggccgtaatgcgcggcatgaccggatggcacggcttcgcgaattaccgcaaccattccaaacccgcactgccggcaaacctccccacgacaaggaaccacaacatgcccacgaccgacaccgccgacaacggagttctcaagctcgacaacgtcgaattccgccgcaaccggcgcgtcatcatcacagacgtgaacctcatcatccacgcgggggagcgatgggtgctgttcgggccgaacggcatcggcaaatccaccgcggtcggcatgctcgccacgcgcacgttcccctcggacggtcgcgtattcatcctcggccatcagctcggcaaatacgacgtattcaaactgcgcacgcgcatcggtctggcttcggccgacctcggccggcagtttcccgaattcgaggatccgctggacgccgtcgtcacgggcctgagcgccgtgaccggacggtggcgcgacacctatactgacgaggagtatgcgcgggcgcgacagctgctgcgcgacttccgcgtctcctatctcgaaggcaaggagatgtggcggctctccgagggcgagcgcacccgcgtgctcatcgcccgcgcgttgatgggcgaccccgaactgctcatcatggatgagccgaccactggccttgacctgggcggccgcgagcaggtgatgcgcaccctgagccgtatcggcgaagaggattcgcggcgtgccgtggtgctggtcacccatcgacttgaggagattcccgcgggcttcgaccacatcgccatcatgggacgcaagccggtctccgccgaggacgccaccaacgacggcattgacgcgatgggcaacccgtccgccggcaccatcgtctacaccggtccactggaggccggcctgaccgacgagcgactgtcggagctgttcggcatgccgatcgaggtgcaacacacgcacgggcgctggtcggcgttcgcggtgtgagaccgaggcgtatcggtcgcgggcgggattcatgaggaaccatgcccgcgcatctgatataacggtagccatgaatggcacgcaagagctgaaggtcgccgtagctcagttcacggttcgccgggagccggaatggaaccttgacattatcgacggatatgcctggcaggccgcggatgccggtgcccgcttgctggtgcttccggaagggctgatcgcgcgtgacggcgatgatgacatgttcacggccgcacacgcgcaaccactagacgggccgttcgtcaccggcctgagacggatcagcgaagagcgtcatattacgctgatgggcacggttcatgctgtgctcggcgcggctgatgcggtgccggacaagccggcgtcttgcgcaacggattcccgggtctccaacgttttcgtcgtcatccgtgacggggctcttatcgtgacctatcggaagctgcatctctatgatgcattcgccgcgcgggagtccgatacggttcgccccggtaccgagctgccgccaatcgtcgagatcgacggctggcatgtcggcgtcatgacctgctatgacgtgagatttcccgaagtcgcgcggtcgctggccgtgcgcggcgccgatgtgatcatcgtcagtgcggcatgggcgcgcgggcgtttgaaggagcgacattggaagatgatgaccgccgcgcgtgcgctggaaaacacgtgctacgtactggcatgcagcgaggtgagcgcgcgcaacatcggctgcagccgtgtcattgacccgctgggcgaggtcatcgcgcaggcgggtgacggacagggcaaggcgggcggacaggccggaatgctgattgcccggctgcaccgagaagttctcgaatccgcgcgacgcacgctgacggttctggagaaccgacgcttcgcagacccgcaattgcgggattgacacaaatttcccgtatgacgcgcatgcggcccgggaatcggccacacgcgtcgcacgacacgcccggattgcgctgcacgaatgtcaaagtgcaccgttgtacttcagtgatcccctgacgattgtgctgagcaatccgggcgtgtcgcgcttatcggaagcgcagatcgcgcgaatcagccaggtcggcatcggtcatgcgaacgaggcggaagcgggcgtgccgtactacgacgataccttcgatgaggacgacgaatgcaccacggccgacatcagcgatccggacgggtcgattgctctgggcctcggcggcatgtactacgaggagggcatgcactataccgccgcatcggaacggcggaagcgggtcgactgtttcagagccgccgggatcctttaccggcacgcggccggccgcggcaatgcgatcggatggctgtgcctggggtacgtgtacgcgtacgaccgctgcgagggtaggtacttccgctcgtattacaacaatttcggcgaagttccacccaaaccggatacggacgttttggcatacgagtgcttttgtcatgcggccgaagcggggatcgcggagagctgctacaagctgggagacatgctggccgagggcagaggctgtgcggctgatcatgcgaaggcgctcgacatgttcctgcgggcgtacatgtgtgacggatattgcggcaggcacatcttacacgaaatacatgattgaggaggacgatactatggatgaggtagtcaaagcagattcttccgcgggcaaaacttaagattttcccagcaagtgacgcttaccatgaacacgcaagcaagaaaatcacggcaaatcatggaaaggagtccatatgtgcactggtgttcgtttctccgacgatgagggaaacatgtatttcggccgtaatctcgactggagcttctcctacggcgagaccattctggtcactccgcgaggctaccagtacgactatgcgtatggggccgaaggtaaaagcgaaccgaatgcggtgatcggcgtgggcgtggtcatggtcgaccgccccatgtatttcgactgcgccaacgagcatggtctggccattgccggactgaacttccctgggtacgcctcctttgcgcacgagccggtcgaaggaaccgaaaacgtcgccactttcgaattcccactgtgggtaacgcgcaatttcgatactgtcgacgaagtcgaagaggcgttgaagaacgtgacgctcgtttcgcaggtcgtgcccggccagcaggaatccctgttgcactggttcattggtgacggcacccgcagcatcgtcgtcgagcagatggctgacggcatgcacgttcatcatgacgatgtggacgtgcttaccaaccagccgaccttcgactttcatatggaaaacctgcgcaactacatgtgtgtgagcaacgagatggcggagccgaccacttggggcaaggcggaactgagcgcatggggtgccggtgtgagcatgcacggcattcccggtgacgtgagttcgccgtcgcgtttcgtacgcgttgcctacaccaacacgcactatccgcagcagaacaacgaggctgctaatgtgtctcgtctgttccacacgctggtttccgtgcaaatggttgacggcatgtccaagatgggcaacggccagttcgagcgcacgctgttcaccagtggctattccgggaaaaccaacacgtattacatgaacacgtatgaggatccggcgatccgctcgtttgccatgtccgacttcgacatggattcgagcgagctgatcaccgccgattgattccgggaatttcgagttcgaagactccagttccaaagattccgcagtgatcgcactatatggacagcataaaagggcacaacgtcgcaacctgaaccgcaccccgattgttggactgaagaaattcagattcgatgatcggaggtgcggttctttcgtatgcgtgaggatcgaaggagccgttacgacgacgggttccggcgcgaggcgctggcactcatcaaggccggagccggcagggacgcgctcgccagacggcttgccatgcccagacagaccgcggagaaatggatcatactgtacaggtccggtggcgaggaggcgatcatgggggaagcaacggcagcagacgctacaactgggagacgacggtcgccgctgcgcgcgaccacgtcgagaacggtctgaccaagacggaggccatggccagacacgggatcgcgagcatcgtggattggcaacggtgtgttggacagtttcttagaggacgagtccttgttcggtgaattccttcgggctccggtatccgagggcggaccggttctatggcgtcgatttggaaattcgcgcacgtgaatccatgccgctaaaggtcactgatccagttcgattcgtacgtaactttgtgcccgccactaccgtgtcgtattcattcgatgatgaagggccacgtaggcagattctgtctgaattcgtacagtcgtttattgtggccatcaattcgttgtccaatgaatatcgtatttcgcaattgctcggcaaggcgaatgacatcgcagcatgcgtgcgtggcgatcgggccaatgcaggtacgtggaatgatcgttttggctttgaagtgttcagcgtgggcatcgaaagcatcgagctcaccgagcaatcacgtcaactcgtgcagcagttcgcctcgaataggatgaatgttgccgcatacgagggcgtttcccagcaagctggcaatatggctgcccagcagcgcattgcgcaaggcatccaagacaacggctttggcgatggcggcatgttactgggcatgaatatggcgcaagccatcaatcctatgaccgccgccccggttcaagcgccggcgcctactccggcaccggaagccgctgctcccgcctctcacacggcatccatgtctgtggaagaacaagtcgaggcgatgaaaaaatgaggcttctgctgttttcgtgggttagaggacggggaccggcaatcggatgggtaggccggagcatctgagtttgatcatggcgatgaggttgtcaacgtggtggaagccgtaggccatgcgtatggtgaccttgatcctgttgttgaacgcctccagtcgcgcgttggagtggccgggtcggatggttctgaggatgtcgtcccggcgcctgcggatcttcctgcatagttcgacgatctcggggatgcgcgagtggctggcccagttgatccatcgtttgagttccccctcggcttggccggcgggctggtgcaggagcgtgcgcaggagttccttgagctgccagaagcggtagagctggcccttgggatccacgccggcgagcgtggcgagggccgtggattggcgctcggtcaagtcgccggggtttctgagcacggcgtatttcaggcccttcatcgcctccgcggccgtcttgtccttcgctcgcctggcctggttccacaaccgtttcctgacccggtccaggcagtcggtcatccaggagacgatgtggaatgagtcgggcacgcgctccgcgttcgggcagtatccggcgacggacgagtcgatccacctggcgccgtcgccggtgacgatcctgatggaggcgcgctgctccggcgtcaattcttcgaagaacagggcgaggacctgtttgccgtatccgtcgtgcgcccaaatcacccgcttgcgttcgtggtcgacgacgacggtgatgtacgtgtggcccttcctgtggctggtctcgtccacgccgatcgccgtgagcccgtcgaacatgcatggcatgccggattccagccggccggcgacccgtccggcgatgtcgcccgcggtcctccacgcgacatgcaggaaaccgctcacggtcttcctgttggcgaccgtcatcagccacgtgcattccatctcgaagtcgcgcgtgaaccggatgcccggctccgcccacggaacccgcgacaccaccacgccatgcacacggcattccacacgcggagccggacccacgagctcgacccgatagcagccgaagtcctggcgccgccaacgcctttcgccgcccccgtcgtcgtatttcgggcatttgcgcccgcagcgcgagcaacgcaacgcggccttcctgcacctgacgcgcgccaccaggaccggagcgtcgcgcagtggggaatcgtcgatggacacgtcctcgacgaccatgcccttgacgttgagcaaacgtttgaatatgttcttcataaggcgttttctgtggttctttttcttggtcgaaaaacaaacctacaggaaacgcccctcacaccctcataatcaacggctcaacgacgagacgacacccacgaaaacaacacaagagccagaaatggtgactctgcatcttgaagaacttcttccaatgtgtaattcttcaaagcggtttccacggcgatgatccgagggtaaattaaagatttcaacgccatatcaaaagaattcaatgatgaaatttgctcgaaggactgcaagtgaagacgattctttgcaatgccagcgaatcggtaccccttatagccgtggtaataccccaggtttttcaattctcttttttgcaattcaccagaacatgcaatgccgttatcacacagatgctgcataagttcatccagtgttttcattgcacccctattcgccaaagtcataagggttaattgtaacttgaagtatgccttagcagtgtggtgtctgccggctcatggtgttggaagaatctttttcattacggttatggttttcggcactacccgattgcgacgcgattatgacgggattacgacgcgattcggtttctgacgacgcgattgcatcttgcttattccccggttccataccttgttgggtgtcttgctgccaaggagcttcacggggcatcgttgatttccttggcgattacgttgaactcatcccgcatgagcgtgaagtatgtgattggaatctgcgtgcgtgcaagtgcgtgaaaatgcgcgagaaaagtgctcgaatctgctttaacaggctgctgcttttatgcaggctctatctgttgaaagcccgtcgcgctcgcgaagaaaacatggctcatggtgaatgcgggatcgcccgcatgttatccatcgaataaataaaggagcgaataccctgggcgttaagcacaatgcgtcttatcagagtggagagaacatggctaagaaaaccgacgaagagctttacgatgtggcgataaatatgattggaagcgttgcgaagcttccgattatcagagttgatagggaagcgtttctgcggcagcaattcgccgattcggaatatctcgatgagattctggagcatggtccacagcatgtatatatggtggagtcgttgcgtaggaaagcggatggagtgattaagaagtcgacgaatcagaccactcttgccgccttgtggcaggaattcccggtggccctgccgccgttgccgctggaggtgccgatgtggcccagtactttggtttcgcgatcaatctggcgcagaaaattgcctatctcttcggagaggatgatttgttcaccgacgagtcggaactgaatgaaggtgccaaagtccgagtccttgcgtatttgggtgtgatgctcggcgcgtcaggttcggcgatgttggtaggaaagcttgccagggaagtcggcaagaacatgggcaagaagatcacgcaacaggctctgacgaaaacggcttggtatccgttgcccaagaaaatcggtgcgatggtcggcaaacaggtggtgaaggagtcggttgggagggccgttactaaggttgtgccagttgtcggcggcgccatttccggggtgataacctatgcgacgttcaaacccatgggtggccgattggccgatgtgctggtacgcaatctgaacggtgagttcgatgagactggcatggaacttcgcccggaattcaagaaagccaataccgcagatgctgacacggaagtcacgattcatgcgatcgagattgacgactgaaaaacggtgggttgggtggctagcagagtagttgtcggttagccatccaacccatcagctttgtcatcgactcaaagtgcttcgctattcttcaaacgctttgtccacgaactcagcaagtttgccttctttcgcgagctgggcggagtcagccattgcgaagtgcgtgtgcagccccttacccaattcgttgtcatatccgaggatgtagtgggtcgcgatttgatagataatctcggtaggcgcgatgccatacacctggtgttcgaggatatgcgccagacggatatggtcatccgggaagtagcggcgcattgccttgctgttgtacaggcgcttgatgatttcggtgatatacatgcccgatttcatgtacaggtcggcgaacgtgtgcgtcggatcgtcgaagcagccggggttctcctgctcgagcatgtcgatcatcttcaccacgactttgcgcggggtgaaaatctggttggtcttctggggcggcacatagtcgaagatgtcttccttgtgggactcatcgaaatagtcggcgagtctgctgcgcagatgaatgaactccacaatcgaatcgttgaagacaacagagtcgaacaggtgaccgtcgaaatgctccttttctccggtttcatggtccgtcacatctccgccgtcgcgcaggagcctgaactgatctacggtgatgctggtgacatccttgaacacgtagtccgggatgatgctgtcgaacgattcaagggtggtgttctcatctccgtaggccatcaggaacgaaggaatcgtgcgggagaaaccacgcagatggtcgcggatgccgtcttcgatgctgtttttctgagcttccttcttcgcggtctcgatctcacgcaccacggtttcgccggcggattgaactatttcgctgcgagactgcttaagattatcaataagattcagacgagcggcttcaatccgttcgtcatgtgcctgattgatttgctcttcctcagcttggctcccggcattttcgagtgcttgcgcacggtcacgttcgatacggttcttctcaatgttgtagtcgccgtactcgcggttgatgcggttattcacatcggccttgatcttacgttcgaccttcttctgttgggaagccttcatatcggagccgtagttctgcttggcggcttcgaccaacggttcggcgacgctgacgccaacagctttctggagatcggcaaggaaatcctcttcgggattctccggtttctcggagacaatggagtcgatcacggaattaagttcgttgttgatattgccatacactttgtccccgaacagatccttggacttgccgatgacctgctcattcggaatggacacttcgccgttctcatcgagattgagttcatcggcggttcctgccttgactccgaggtcttctctcggagccttgtacggttccagctgctgcagggtctcaatcacttcggccggagcatggaagatgttgctgatgttctggaacaggaaatcacacatgaagccgcggcgcacaacctcgcgcgagtggatcttgcgtgggatggagagcacctgttcggcgtccagatccaccatttcgccgtcttcgtcttcgccgattacggggaagaagttcaacagccgacgcacgttctgtttgcgtgagtcggtatcgccgcctccacatgtggtgccggaatacaggtcgttcgcgtattcctcgaacacagtcagcgaacgtgccgggtcaaaatcgaacacgtacgcgttttccttacgctggtatttgccgttcctgttgaataggcaggggttctgcgcgcggaacgcggcttgcacgtacagcgccgggctcttcatgtttgatagcatgagcacgcctgtccattcgggaaccgtcacgcctgtggtcagctgaccgaccgacaaagtgatggtcttcgtcttgacaccttctccgcccttctccgctttggctatggcgttgcggaccttgtcgaacgatttctcgttctcctcgtcgtcatcgattttgccatccccggccgcaaggatgatctcatagtccttgaacacttcatgctgtcggagcatttttgcaagggctcgggcagaatctacgcggttgagcatccagaacgtgtggcgcagctcgtcacgcgactctggcgtggagaacgggtatttcttctgtgtggtcagagcgtcgaggaaacgcttcacatcgtcatagtgaacgaatcgcccatcctttgtctcgaagaattcgttcagatcgaatgcgtactcggtctgctcaccatcgatctgcatgcccttcgccacttcgttctcgatgatgtcggacatttgatacgtgaacatgttgagtttcggcaggttctcgtatgggttgcgtagttccggatcgttccagtcccttttggcctgctgctcgtccgcatatgtccagttgtagatcgcgttttcagggaacttgtcgttcgcgatggccttgaatggcgttcccgacaggtgcagtgtgttcctgcgcttgatatgatcgaacgccacgtccgtcttgtacgtgtccacgccttcgtgagcttcatcgatgacgagcaggtcatattcgtattccgccacatactttagcttgtcgtaatggccgccgaactcgatggagcccttcagatcctgcagactgatgaactcgatggagctcggaagcttgcccttgcctgcaagatgcaggtattcatcgtggctgatgcaatatggcttgccagccaaagcgtccacactgctgatgaaccgccagccggaatcggtgccgacgaacttgacatagtcgtcataccaggaattcgcaatcgcgggacgattcgtcacaacgagaatgcgtttcgccttgccgtcctttcctggcgtgggaaggcgcttgcaaaggtcataggcggcaagagtcttgccgaaacgcggcttcgcgttccataggaactcgccttgctcgtgcaactggaaatagtccagggtcttgctgatcgcagcttcctgctcggctcgcagttcataatcggaggctccgagaccgtcaagaattccatgattctcgcgaaactcatggaacctgcccttggcgttcggaggattaatctcgaaccattcggtgccgggctgatcattgatgccgagattgcgcaaataggtatggaaatcagtgtcatgaaacacttcgccagtgtcctcataagtggcattgccatgccattcgagtttcgcgatgacatctgccgtatgagtttgttgcgcgatacggacgtttacgtcctgctcggtataaccgattttcgtccagccgtcatgacggcggatttccggagtagtgtatgcataaatctgggggagtgccggttgagtgctcttgaccttgcctgtgatatcggaaacgctcatcagttcatctccttgatcatcctgttaatgaaggctatttcttcggaggtcaatttatacttcttgaacagctcctcgtcagtccattgcttggtgaaatcttgtgtgggaacaaatgcaaaagtagccttactgatttgttgagtcatggcaatctgagcgagaaggaaacgggtaaattttgttttcagatacgtcatgaaattatcggcttcatcttcggtgtcaaaggaaccggcaacaagatacgtttctgaacagatagtttttggcggaatcttctccatcgtagataggattttgaattgcccatttttgtcaggttgacctgcgtgctcagcagacaaacgagaaataatgattttccattgatcgatcatgccaaatccagagatgacgtcttctctgcggaatggtccaacgcctttgttgtaccgtaatgttaatttgccgctagatgaaggctttgctgtagtggaaagaccaaatggctttctggaggagaccatcttgtcgagggtcgattcttttaaagaagttacttttttaacgatgcgttcggctactgggtaacggattagtgtttcgaattcgttgagaaagcgctggcagtctgtggtaactccgttatgcgtattggaatagtggcagccccccccctcatagcttttatcgcgtacaaaaatgcacactccacctgcgatatccgcgtcggggaatacgtcgagcgaattggtgtagtcggccaagcgacgaatatgcgagtcattgagcatttcctgacggaattgatctaggccctttccgcctgaataccacttggccggaatgatcaagctcagtacagaggggtcaagttctttgacagcatcgataaacttgttatagacgggagttgcgctggctcccgctccgccgtcctccatctgatatggaggattgccgattatatagtcgaacttcattgttttgctcccttcaacagttggctatatgataacgaagtttttgctctccagtcgtataaccggacaaatgctggtacgtcttgcgaattgggttcatcaagcatggtcagcatgtcgagcatgtcgaattcgaccttctgctcaggtggcttacggaatggtatcgtctcggtcagtccatccatctgccagaggttccagacgattacattcgcaatctgcttgagatgcttcttgtccgggtcggtgccgaatctgttgcggtaatgatctacgaaggtaagcaacaggtttgcgcgtgcgatcagcaggctgtcgccttggaattcgtagccgtatacgctttggaatgcccgcaatgtccacttccaccacgtcaggtcatcttctgtgtgctcatctacgatacgtagtttgcgatcaagcaggccaatgcgttgactgatgggcagcattgctcctgtagcggcgtcgtagcgcgataccaggaacggggcttcaccgcaggtgatttccaatcggcggctgtccacatagtcatgccagccgtgctttttcgtagaggggaacgtgatttttccctccgtaggaatccaggaatggtcttcctgctccgtattgaacacgtgctttcttccgaaccattcctcatcaagattgttgaccatctggttcaccatccatgatggtgtgaatacctcggcttttgctttggtgcggtctgtctgctcatccaagcttttctgtactcgtggcacaatgcatacggtgggggtttcgcctgaaatctgctgggcaagtatcggcgctgcttccgtggcggtcggttcagcgtccacgtacgcatcagttgcgtagatgatgttctgctttgtgctcttgtcttgtaggagagtgtccagtacattcttcaccggatatgcattgaaatcaatgagcggtgtgtattgggtcttgtccgtattggtcatgctcgtcctcggggaatggtcactcattgcttgtctaagtatatatacgaggtatatatacgagagttcgaaagtggtgtgtcatgaggtcttgggtgctagccttagcttccaagaatagctttagaggagaaacatcatgccagtgtcggaaaaagagattatagagcgtttgcccgattggatcgccgaaaagaagacgagttttctcttcggttcagggacctccgcgccgggaatgcctttgatgaacatgtttccaggcaaaaaagatggttccacggacgtagatggtctaatgtatgagataatcaagagaaataaatttctaattggtgctaaaatgaaaataaatgtctctgaagaagaatctaaggctattcttggtacattaggtgcatataaaaagtttatcgaaattcttcttgacatgcttggtaatgttaatgccagagagcgtcataaaaatatcaatatttttacgactaattatgatttgtttattgaaaaagcagttgatgatatttatgagagtggatcaactgccccttttatattcaatgatggtgctcgcggttatttcaataggttgttggataattcgaattttgatactacgactgcttataaagggagatttgataattatataaatgaactgccatccataaatcttgcaaagattcatggatcggtgaactggaagaagcaatccgaagatatgattcgggtttgtaattacgttgttagagataagcctgagaaaagggagacggttaaacccgatgggaacgagccaaaggctacaactttaaagaaacactattacgaaatgctgcgtttctttgaatatgaaatgtcggaaagcgcggagaacattggcaatggttcactgcttatagtgcatggtttctcattcggtgataagcatattgttcatgccttgaagagagcgctggaaaatcgtgagctacttgttatcattgtggcttatacagacaatgatgtcgaagtaattaaaagaaatctcaaagatttggctgagagaaagaatctgcgttttctgtgcccaaaagacttttctttccatggagaggaatttagtcgattggaccttaataactttaataaaattattgccggaaaattgaagtgtgcctaaggatgaagaaatttgtgaagcagggtgaaaaggagctcggtgttgttgtatcagttgactccgacgaagcagtagtaggtatgtacaatgtgaccaatggtgcttcgtatttcatagatggggaagagattaatggtataaaagtcggtgcttatgcgattcttaaacagggtcggaatcgtattgtagtaacggttttatcggaaaaagtacgtgaccagttaaacaccattaattcaaaggagttcgacaaccgttttcatgctcaatcgattcagagaatagtaagagtcaaatctcagggtgtaataaaggaaggacagttttctgtaacgagttctactgttcctatggtaggtaatgtccttgtttctgcatcttctgaagatatcgcagctattttttcgcgtggtgttgatgaggagaagtccgtaactattggtcgttcgctcatggaaaatcagccgattagaattccgattaacgatttttttgcttcacatatcggtattttcggcaatacgggaagcggtaaatcaaatactttgcacaaactttatcttgaactattcagttctccgtatggtaatgctgctttagggaaaagcatttttgcggttattgattttaacggtgagtatggaagcggaaaagtatttggaaagcatcaagtaaatgtttttgatggtgcgaaacgaaaaattttgattgacgaaaatattttctttaatgctaacgtattaaaaatacttgctaaagctaccgaaaatacacaatctccatttctgtctagaactttaaaacaatgggaggagcatgagaagaatatatgctctgatatgcaaataggacttttaaaaaaatgtttgcagcgtcgtgatatcgcgctcgtggaggagtggcgtagcgtagcaagagacgtgcttcaagaaaattccgacgataaaattgattgcatgaatgtacttgagacagtttccttattcaaaggagatagcttgtcttatttaactaatgctgggactggatttattaatcaagggcgttctttagatgaggtatcttctcttaagaaaaacgataactctggaaagtatgtgtcatgtattccgtctagtgatttgaaacttgaagctataggacaagaattagaagaaaaaggtaaatctcttgatttatttgattcttttttggtttttataaaatttcaaaaaatatatgatgcaatgtataagggaatgcagcttgaatggttaaagcccgtagtgggaaggttagagaggcttttctcttctgttaagaaatacgctgagataataaaaaacgccactgaatgttatacaaaaggaataagcgtctttaatctaaaaaatgttgatacagagtgtaaagagacttttgctctgttgctttcaaaaatgctttatgaaaataagaaaaatgattcgaattgtgcttccgttcatctgataattgatgaggctcataatattctcaattctttcaaatcaactcactctgatgtgtgggaagactatcgtctaactacttttgagacaatgatcaaagagggacgaaaatacggctttttccttacaattgcatctcaacgtcctgcagatatttctccgacaattatgtctcagattcacaactacatcattcataaattagtgaacgacaaggatttgcagatgctggaaaatacgatgccaactttggatgctttctctaaatcacgaattcccactttaggaaagggtgaggccgtattgactggacgtgcatttggaatgccatcgttgattaaagttgattatgaggagtattcgcgtcctgattctgatgatgtcgatttgatcgcagcgtggagtgagaatcctgaagcgtctaagtgatgttttataggtggtatagtcgccgtgatgcatgcttgatttgctgtatggctgaatattcgtagcttttgaggccactggttattgtgtttggaggccggggttatggtgcggggaggccggtggcggactggttgggggccaccggccttttgggttagttgtcgagcatggtttgtccgtggcgttgtctcatgttgtattcgccggtattaatccagatcgtgttgtgcacgatgcggtcgaggatcgcgtcggcgatggtgtcgcctccaagctggcggtgccattccttggtcgccagttgggtggcgaacgcggtgctggccgtgtcgtaccggagttccatgagctcgagcaggaatcgtttgaatggttcgtcgggcttgtcgacgagccattcgtcgatggcgagcaggttgtaggtggagtatttgcgcacgagcttgggcacgcctcccggtttgccggccgcggccgtcacctgttcggcgaggtcgggcatgcgcacgtatatggcgcggtaccgtcctctgcacgcggatttcgccaacgcgcacaatagatgcgatttgcccgatccggtggctccctggaacacgacgttcagccgctggccgaggtagtttccggcgtcgaggcctgcgatcacgctccggtcgagcccgcgctcctccatcaggtcgatggtccgcaggtccgcctggggatagcgcagtcccgcgcgtttgaccaggcgttggatcctggcgtccatgtgaccggagtgcgcgctgtcgacggcgagcctgatcacctcagtgtggctcaatggcatggtggtttgttcgtcgaggcgttcgaacgcgtcgagcaggtccgtggcgttcatctcgcgcagcttgcgtttggtctcggtgtcgatgatcattgcgtctcacctgcccatgttcgcgtagtagtcgccgccgcgcacccaaccggcaccgtcatccccgccgtcggcgccgtgatcgccggcgtcgtcggggatctcgcccgcgatatcctggccggattcgaggatcggcccgatatgcgcgtagcggggcgaggcgaccgactgcaacgccagcgagcacgcgttctccaaccgttgcgcggaataccgtttcgacaggcgcagcaccgccaacgcggggtccaccgcctgttcgtcgagacgttccatggcgaacagtttgcctatgacggtggcgcagtcgggtccgatcctgttcgcccactgctcgcatcgtttcctatcccacggcttccacatggttttgccgggaaggtcggccccgttcgtcgaatacttgttggaggccgacgccggcaggagccggtgcgtgcagagcctggtatttttgtgccagatcttcgagcgtgttcgccccgatcctcaggtccacggtggagccgacgtacgcgtacgggacggaataccagttgcgagcataggcgacgtggctgttggcctgaaccctcctgctgtacacccagtccatcacctcgtatgccaccggaggcaacgcgatcagcagcggcttctcctcgccttcgaacaccgacagacgtgatccgtcacgcttctggaacgggcgggaattgtattccacgagccacgcgcgtatcgcggtccgcagctcgtccaacgagccgaactggtggtcgcgcatcgcgccggccaacgccatcgtggcgtgccatacggtgttctccgccgagggcttgtccttcggcttcctgacccgtccgggcagcacggcggccgaatagtgctcggccaaaccccggtacgcgtcgttcaacacgacctcgccctcgcgcggatgcgcgatgacgccggtcttcggattgtcacacaccaggcggggcgtggaaccgccgaaccactcgtacatcgccacatgggcccgcagccacgagttctgcgccatgtcgagcgtgggttccacgaacgcataccggctgaacggcagcacggccacgaacagatacgccgttgacgaatccccggtgaccggatccacgatccgcaaggtcttgccggcccagtcgacctcgatggtgcggccggccttgtgctccaccctgctcgtcacgcccaacttctgcacgtatgcggcgtacagcttgcagaaccggtcgtaacccatatggggtttcccggtccgtcggcatccgtccacgtattcgccgtgcaggatcctcaacgtcacgcccacacgcgccagctcgcgatgaaccctggcccagtcgggctgctcgtacacgctttcgcgctcaccccgaccgggaaacaacagggcgtacacctcgccgtcggtcttgccggtgacatcatcccagccgacgccgacggccctcgccgcatcgagcacatcggaaacgctccggcgcgacatgccctgcgacctcgcgatcgcacgccccgacaaaccctgggcatgcaaacgcagcaccagtttcgcctgtatttttcgtaccattgctggtaactcctttcaccacacgtccctcgcatggtgaaaggagcctaaccaaccacggctcccaaacgcaataaccccggcctcgaaacgcaataaccaccaaaactcataatggcccccaaacgcaataaccccggaccccaacgagtcaaatattcagtatggcgaagtaaattcgctatgtagtagggtctgtctagtggggggcatatttgttttttagtgtgagcattagtatgtggcagtttgaaggcgaaacggaggaatcaccatggacgctggcaagaaaatcctgctggacctattgaccggttcgcttcggttcgtggttccggtgtatcagcgcagatactcatggggcgagacgcagtgccggcaattgtgggctgacatcgtaacggccggccggcatcctgacagaacccatttcaccgggtcgatcgtatggatgcaggagggcggcatcggcccggacggcgtcagccgttgtctgctcatcgacggtcagcagcggctcacctcggtgaccctgctgctcatcgtcttggcagaatacgcccacgaacacccggagaacctgcgcttctccacagacatgatcatcgaccgcggttatcttgtcgacaagtatgcgactggcgaaggccgctgcaagctgacgctttccggcgacgaccgggacgtgctgcgcggcatgtgcgaccatgtgcttgcccttgaccggccgaatcatgggaaccaggccggaacaacgtcccggctggaagcgaacctcgatctgttccgttccctggtcgccgcaatcgatgacgtgaacacggtgtggaacggactgcaacgccttgaagtcgtgtccgtcaccctggaccagggacgcgacgaaccgcaactggtattcgagtcgatgaattccaccgggcttgatctggagacttccgacctggtacgcaactacatgctcatgggatgccccatagccgagcagaacgccctgtacgccgactactggctgcccatggagcgtgtgctcggcagtctctcattcgacgcgttcctgcatgactggatggtcgtcacgttgaagaggcccgtgtccaagaaccgatacatgtactcggaattcaaacgtttcgcagccgacagctccctgccgcgcatggaacgcacacgcgggcttctggagaacatgctggaatatgccgggtattatgccgccatcaaaggcatcgcgtctgccggcagcggcgacgcgaacgtggaccgccgtctcgcctcgatccaaaccctggacagcactgttacggatccgatgctcctgtacatgttcgcggcatggaagcatgaacgcataacccgggacgggctgctgcgcatgctcgcggatctcgaatcgtatctgttccgccgaatggtctgctcggtatccagcaacggactgaacaagctcgtcccgtcgttgatcgccaagctcgaatcagcggaagacgatccggccgaaaccttcgccgcgctgctcctcaccgaaaccgccaaagccacgcgcatgcccacggataaggaattcaggcaggcactgctcggcgagaatctgtaccgcccggcctcgcgctgcaaatatctgctcgccggattggaaaaccacaaccaccccaaggacccgcggtccttcgacgaatacaccgtcgaacacatcatgccacagaacgccatggcgcatgccaaatggcgcgatatgctctccgaccccggccgattcccgctgctggtgaacagtctgggcaatctgacattgaccgcatacaactcggaactttccgacggaacattcgaacataagaagaaccgtgcgatcggcgggtataatagcgaatacctgtccatttccgctgaactgcacgacgccacgcaatgggatgaacaggcgatcgcgcggcgcggcgcgcgacttgccgatcttgcattgcaggtgtggacaagccccacagcgggggaacaggctatgcagactctgcgcagcaggaacttgagccaaggagagcgcgaacagaatgccgtcgatttcgccgacttatgcaagagagggatccttgcagccggtgacatgttggaaagtcggtatgccggcgtaaccgccacggcaaccgtaaccgaagaccatcgcattcgcctgtccaacggcgagatattcgatagcccatccggcgcgttccgccgcgccagaatgctcgaaaccggcgagaacaagcagatcaacaacggttggacagtgtggaaagtcgcggacggcagaaccttggacgaactgcggcaagtcagcaacaatatctcactgcggcgcagcttctggaatggcctgtataaatatgctgcaacgcggcccgactttgttgctgtatacggcgacccatccggtcgcaagacgaacagcgacacatggatcagcttcggcgtaggctcggggttctgccacccggatggagcgttgaatattcgagacggctacattacggtcgacctgtatttcatcgacacgttccagtacacgaaactttacggcatgaaggattccgttgaacagatgctgtctgctttgggcgaggcgacttgggacgagccggaagccgacaagaagaaccgccaccttttggtacggcatgatgtggatttctccggcggtatgacagaagcctaccaatggatgacggacgggttgctcgccatgcgcagcgtgtacgatctgcttgtctgattgctcgatctgctacgtgttcagcactgtatagaatgagcataaccgttcgaaaagaggccgccatgaaatacgggatgaggaaacccagttggaagaaaagcctgtccgcgcgtacgaagggccgcgccacccgtgcggtcaagcgtgcgctgattcccggttacggcaagaagggcatgggctggctgcaccccaagcgcaagctgtacaacaccatctacaagaagaccacgttcagcctgttcgatctgttcaagtaaccggggctaaagggggaaatcacatgtgttccaatccagacacgtacgagttccgactttcattagaccttcctcaacagagcgccgttcctactgatacgttttctgccttgcgggaaatccatgaatattcagcggagaacggcccgcgttcccatacggctgctgagatgtttgattctctgggaatatgacagatcccgccatgcgaacattgcgcatggcgggatctggtttttccgttattgctcagctggcagcgctcagacgagcatggcctcgatgttgttgtcttccggatcgtgcacgaaggcggcgtagtaggtcgggccgtagttcagacgcgggccgggctgtccaccgacttcgttcgtatcctcgttatcctcggcactttcgtcgtattcttcgctgaacgagtatcccagattgcgcgtcatcgcattctcgatcacgtcataggcccacatgcgtttgtcatcatatcgagcgaaagcgagcgtgctggaaatcaacagcatgctgttcagtggttcccattgccgcatgtccttgtcgttctcggcctgtgcaatggcgtccaacggcacgtagcgtttgagcagaccgtagacggagaaactggcggcgagcacgattgccatccacgggaacgtcggtgactgcgcagtgaacatgcccacgcccagcgccacgttgagcagaggcgtagtcaggtacgcgattgaggtctgcagcgcctggccgttgaccaccagatatatgtacagcaaccaattcacgctgatagccgtggtggcggcgagttccagcgcgagaacagccttttgctccgctgtgcgcgtcaaagcgcggcgatcgcgcgatgatatgcgcgatagcggcgggacgccatcagcagcgcaatcatgaccgccagcgtggcgatcagccgatacgccagcacgctgatggcattcatgccggacagcgcgtgccagtagagcggcagcacgccccagccgatattggaaacgagcggcgcggcaatccccatccgcgtctgctcgacagcacgagccgaagtcatacccgccaccatagtgcctgatgtgtcactgccgtgcgtgtgctcacacggcatttgttagaagcttttccgggaatcgaatacaagttatccccgacccaatacggtccgattatctcagcaccgctcccgaatgaaatcgaagatcatatcgaacacctgcgggctccagaagtcgtgctcgtgttctgcgccgtcgaccagcaccagccgcgagtccacgccgtgttcgagaagcctcttgtgcatcttgaccgactgccggtaggggaccacggtgtcggcggtgccgtgcagcagcatcgtcggcggataggccaccccgtcacgcacctgcaggtacgggctcatgtcggccgcccggcggcgcacgtcgtcgctcaatccggtttcatgggtcgccccgaccactgcggcgaacgggccgaaatagtacagccggaacgggtcatcttcgttgccgaacgcgtcgatcgcctccatcatgtcggtgggcgggaagcagctgaccacgaagctcaccgcgtcgctttcggtggcataactgccgtcttcataccgcgggtcgtcggcagtgagccccaccagcagagacgtgttgccgccggacgacgtgccccagatgcccagccgctcagggtcgacgtgccagcgccgcgcgttcgtccgcaggtaccggatcgccgccttgacatccttcagataggcagggaacacggcactggcgtcacgcgaggcgttgcgatggttcaccgtcgccaccacgaatccctctcgcgccagttcggatagctgcgggatctcgtaatcacggtccggtgtggtccacgcgctgccctgcacgaacaccacggtggggtagcggcggtcatcatcgtcgccggtggattgcggcgcgatgatgtccatcaccagatcatcggccccggtgcgatacgccacgttgcgggtgagccgggccaggccggtgagcgtgggattattcggtacgtgaacggtttcgacggttcggtcttctgacggcgtgatattcggcatgaggcaatgttacagcgaatggttctcaataagaaaggtgcgagtccgttatgtgaggaaacgaacacggattacttcataagcccggtattttgccggtctctgaaatgttcgattgtgcggaaatgttcggaatcctcgcacttttcttattgagaacgattcgctgctacatccggaacgcagcgcgcgggtacgctaaactgtgtacagctcagaaactcaccccaaggagatgccatgaacccgagacgcgggccgatcgtcgcaggcgagaagatccaattcaccgaccgcaagggcaagaagatcaccgaccagctgaccgccggtggcgtcacccagaccgagcacgggatcattctgcacgacgacgtgataggccgcaccgagggcgtggtcgtcaccaccgtcaccgccaagcgcgaggctcaggtcaatgcggaccatcccgaacgcgaccggaacaagccgtggaaggcgacccgtgcgatcggcggctggcagtatgcggtcatgcgcccccgtctcgccgactacgtgctctccatgccgcgcggcgcccagatcatgtacccgaaggacatcgcgcaggtcatccagctcggcgacatccgaagcggcctcaacgtgctcgaatctggtgccggatcgggcgcgatgagcgtcaacctgctggatgcggtgggggagtccggccacctgaccaccatcgagctgcgacccgaattcgcccgtgtggccgacgcgaacgccacgctgtattacggcgaacgcccgcggtggtgggatctcaagaccggcgacttcgactcggtcgcggccggcctgccggagcactccttcgaccgcatcgtgctcgacatgctcgacccgtggaacaggctcgaacaggcgtaccgggtcatcgcgcccggcggcgtcctcatcgcctacatcaccaccaccacgcaaatgagccgactcgtcgaggctctgcgcgaagccggccattggaccgatcccgccatccaggagacgctggaacgcacgtggaaggcgcaggggctcgccgtgcggccggaccatgcgatgatcggccacaccggcttccttgtggtctcccgcgcgatggcggaggggttcgcggccctgcgcaaacgcgaccgcgccaccaaggatacgaccactgacatcgattcgctcacccccgaacagcgcgaggcccagctggacgatctggagctgcgcgacatttcggaccacaagctgcgcaaggtgctgcgcgacctcgacctgcagacgtcccgactgtcgcaggacgaccaggcctgcaagcaaggcgaggcgacggcgatctgacagcccaatcaggcgcggcgaatcttaacggcaggcaatgatttggtgatgacgggaagtcgagcgcccctcgtctgccacaatggaggcagtgacgtcgtacggaaaggtcctgaagaatgggcgtgaatctcagcaaggtcgagaaaaaggcgaagaactattcccacgtgctgctggtcatgcggcacgcgaaggcggaaccgttcaacgacaagggcgaccatgaccgcgagataaccgacaagggcgagaagcaggcgaagatcgtcgccaaggggctcgtcggcatgaaactgctgcccgaccgcgtcgcgtgctccggcgcggtccgcgcccggcagacgctggagagaatgctcaaggtgttcggcgaccatcccaaggtcgaataccgccagaccctgtacgacggcggcatgcaggccgtgttcgacgagctcgccaacgccaaggacaagacccgggtcctgatggtcctcggccatgagccgaccgtttcggtgagctgccagtggctcgcctcctcggattcggacatggtcaagctggatctgctcaacctgggcatgtccaccgcctccgtggtggtgttcggctccgatcagccgttcagccgctggcaggtacacgacgccgagctgctcgccgtgctcagtcccaaggacttcgactagggatgacacctttttgccggccggtctctctcgcgaacggtgacagccggcttgtgttataaccaccgtttataacgacaccttaatgcttctgatggcctcgcaatcggcgggttttggtaatctaggcgggtcatagtcgtacataacggaggattcatgcctgcacttacatccgtctcgggattcccgcgcatcggacagaatcgtgaactgaagaagatcattgaagcctactggaagggcgccgcctcactcgacgaggtgcgcggcaccgccaaggaacttcgcgcgaagcactggaagctgcaggcacaggccggcgtcgatctcatccccagcaacgacttcagctactatgaccagatgctggacaccgcgatcctgctcaacgtcatcccgcagcgttacaagcgactcgccttcacgaaccccgaggagacgctgttcgccatgggccgcggctatcagggcgacaagggcgacgtgaccgccctgccgatgaagaagtggttcaccaccaactaccactacatcgttcctgaaatcgaggagagcaccgagatccgcctcaacggcaccaagccgttcgacgagttcaacgaggcaaaggcccggggcatcctcaccaagccggtgctgatcggtccctacaccttcctcaagctcgcccgcaacgcgcaggccgaggagctcacctacgacaagggcctggtgaacgcggtcgccgccgtctacgcggaagtgatcaagcgcttcgccgcactcggcgcccagtggctgcagctcgacgagccgtacctcgtgctcgacaaggaggacggcgacgtctccctcttcaagagcctgtacgcgaagatcctgcccgctcgcgaagacaagatcaaggtgctgctcaacacgtacttcggccacatcgccgacgtgtacgagaccgtgaacctgctgggcttcgacggcatcggcctcgacctcaacgaaggcaaggacgagaacctcgccgcagtcgagaagtacggcgtcgccgagaacaccaccctgttcgcgggcgtggtcaacggccgcaacatctggcgcaacaactacgccgtcagcctcggcctgatcgacgcgcttcgccagaagaccgacaacgtggcggtgtccaccgccagctccctgctgcacgtgccgttcagcaccgagggtgagaccgcccttgacccggccgtgctcaagcacttcgcgttcgctgtcgagaagctgaccgagctcaaggagatcgccgtcctcgccgactccgatgaggacgccaagaaggcatccgccgatctggccgccaaccaggcgctgttcgacggcacccgcgttgccgccgatccggcggtcgccgagcgcatcgccaagctcaccgacgccgacttcgtgcgccagccggcccgcgccgagcgtcagaaggagcagcgtgtcgcccttggcctgccgctgctgcccaccaccaccatcggctccttcccgcagaccaaggagattcgcgccgaacgcgccaagctgcgtaagggcgagatcaccaaggccgaatacgacgagttcatgaaggcccagatcgacgcctgcatcaggcaccaggagcagatcggcctcgatgtgctggttcacggcgagttcgagcgcaacgacatggtcgagtacttcggccagaacctcaacggcttcctgttcaccaagaacgcctgggtgcagtcctacggcacgcgctgcgtcaagcctccgatcgtgtggggcgacgtctcccgcgccaacccgatcacggtggaatggtccgcctacgcgcagtcccgcaccaaccatgtgatgaagggcatgctcaccggcccggtgaccatcctcaactggtcctggccgcgcgaggacatcacgcacgagcagcagacccagcagctggctctcgccatccgcgacgaggtgctcgacctggaggccgccggcatcaaggtcatccagatcgacgaggccgcgctgcgcgagaagctgccgctgcgcaagaccgactggcacgccaagtaccttgactgggccatcccggcgttccgtctcgtgcactccgcagtcaagccgaccacgcagatccacacgcacatgtgctactcggagttcaacgacatcatccgcgacatcgacgcgatggacgccgacgtaatctccttcgaggcgtcccgtggcgatctggtcgtgcttgacgcgatccatgacgcgcacttcgagaccgaggctggcccgggcgtctacgacatccactcgccgcgcatccccggcgagcaggagattgaggaccgcatctacgagattctcaagaagatggacatcgagaaagtgtggatcaaccccgactgcggtctgaagacccgtggtaacgccgagacctggccgagtcttgagcacatggtcgctgccgccaaggcggttcgcgccaagatcacgaagtaggaccctataggcccctgctggcgggggctgtcgccgtaggcgactgggggtggtggagcatgacccgaccacccccagtccggcatcggccggacagccccgccggcgggggcaacttcatacttgtagtaaggaacctgatatgcacacacccatgttttcgctggaggtgttccctcccaagcgggacgcccccgtcgggaccatctacgacacgcttgacgggctcgaaggcctgaaccccgacttcatctcggtcacctacgggcacggcacgcattcggaccgcaccgccaccgcgcgcatcgccaacacgatccacggggaatacggcatccccgccgtggcgcatctgaccgccctgtactcggacgaggcgaagatcgacgaggcgctcgacatgttcgaggcggcaggcgtctccgccgtgctcgccctgcgcggcgactacatcgatggcgaggagccggtcggccgcttcaaccacgccagcgacctcgcggcctacatccacgaccgcaagcccgacctcaatgtgttcggcgcctgctatcctgaaggccactattcggccgcctcgctcgacgaggacatcgggaacctgaaaatcaaggtggacgccggcgtcacgcatctgatctcccagctgttctacgacaacgacgacttctaccgtttcctcgacaaggctcatgcggccagcatcgacgtgccgatcgaggcgggcatcatgcccgtgcgcggcgcgaagtcggtgcggcgcatggcgaaggtcaatgcctcgcgcatcccggctaagctcgaagcactgctcgaccgctggggagacgacatccagaacctgcgcgcggccggcatcatctacgcctccgaccagatcgcggacctcgtggcccacggcgtcgacggcgtgcacctgtattcgatgaatcatcccgccaccacacgccgcatatggcgcaacgtggagccgctgttcaccgtggaatgacactcccggcaaacagccgattacggcaaaatcgttggggccagacagtcatgcggctgtctggccccaaccatatgagaatgcgcggccggcaacagcacgccgcgtatctgccgtcagcgacggcgacgcttgctgcgcctgaagtcgggtttgggcgcgaaccacgcgatccgcgtggtcacggcccggcgaatcaccggaacgttggcgatagcgatgcccagagccacggcgatgagcgtcgtccacatggcgacgttcatggaggccagggcgagcacgacgacgaccacgacgatggcgaagccgagcaccttctgcacggtcgcctgcacaggcgtcatcctctgcggctgcagcggcatggcaccggaaacaaagcccatcagcaagccgacgatggcggagacgatggttacgatcagttctgcggatgacagttgcataccgccattatgtccatccggccacgacacggccgtgtcatcgcggccgaggaagcacggtttcttgtaaaattgtaggttatgactgttccgggaacctttgacaccagcgcgcgcgaactcatccacgcaggcctgcagaatctcgacgaagcccgttcactgttccgccagctctccgccagcggattcgatgcggcacgctgcggcctgctgcttgacgcgcttcagcatgtctgtgatcccgatgtcgcgctgcgcaacctcgtcgacatcgtcaacgcgcaggtgagccagggccgcgcgctggatgacatcatgcccgacgacacggcgttccgacagctggtcgccgtgctcggcgtctccgacgcgatgggcaagctgatgcggttccgccccgacctggttcaggccgcggcgaccgaccactgcaacagtcacctctacaaccatgaccagcgccgggcgcacgtgctcgaatccgtcggagccgatccgaacgaccgcatgtccccgacagccacgatggacctcgccgacgccgccaccgccctgcgcaggacgtaccgcaaccagttggccgccatcatcgcgcaggacaccatgagcgacgaccccatcgccctgcagccgcgcatcagcagtgagctgtccgacctcgccgatgcggcccttgaaggcgccctcgccatagcccggcatgagatcaccggcagcgagcactgccgtttcgccatcatcggcatgggcaagctcggcgcgcgcgaactcaactacgtgtccgacgtcgacctgatctacgtggtgaaggccgccgacgcggacaccagccagcagcagctgtaccgcatcggcacgaagatgggcacgatgttgcagcgcgtgtgccagtcggtgatcatgggagtcgccgaaccggcactgtggcagattgacgggggactgcggccggaaggcaaggacggctccctcgtgcgcacactggaatcacatcaggcatactacgagaaatgggcgcagaactgggagttccaggcgctccttaaggcgcgtccggtcgcgggggacccgcagatcggcgacgcatacatgagcatgacccggcctatggtgtggagcgcgtcgaagcgcaagaacttcgtctacgactgccagcagatgcgcaagcgcgtcgaggacctcatcgcgcccgcgctcaaggaccgcgagatcaaactcggccgcggcggcctgcgcgacgtggaattcaccgtgcagatgctgcagctcgtgcatggccgcaccgatgagacgctgcgcaccagcgccacgctggaatcgctgcgcaggctgtccgagggcggctacgtgtcgcgcaagcaggccgcgaagctcgcccgggattacagcttcgaacgggtgatggagcatcgtcagcagatgtgggcgctcaagcgcacgcacctgttccccgacctcggcgacggcagcgtcggcggacttgagaagaagcgcgacgtcaatgtcgaaaagctcagccagaaccccgagctgcgcaggctcgcccgcgcgtttggcctgcacgccgaggagctggtcgcgaaatacgacgagacgcggcgcgaggtgcgccggctgcacatggacatctactaccgcccgatgctgccgatcgcggcgttgaacggcgaggatttctcgctcgccccgcaggtggcctacgaacggttcgcgtccatcggattcgccgacccggaggccgccatgcggcatgtggccgtgctcaccgcaggcgtgtcccgagcctccaagatcaaccgcatactgctgccggccgtgctgcaatggctggggcaggggcagaaccccgacatggggttgctgaactggcgcaagcttgaggagcgtttcggcacggacagcgagtacctgggcttcctgcgcgactccaattcggctgcgcaacggctgtgccacgtcctgtcgaactcccgtttcctcggcgacgcgctgaacaagtccgtggagtcggtcacctggcttggcgacgatgacgcgctggtcgcacgctcgcgcgagagcctggacgtgcaatgccggtcctctctgagccgcaacgccgacgacatcaacgatttcgcgacgtcgatgcgagccatgaggcgccacgagatcgagcgcatcggtctggcctggctcagcggcgtgatggacgaggcggcgtgcctgaccggcatgaccgatgtgtacgacgccatcatcgatgcggccctgacatgggcgatccgctatcagacatcggcgatggggctcggcgagccgcctgccgcgatcgcggcgatcggcatggggcgctacggcggccaggaggtcaatttcagctccgacgccgacatgatcctgctgtataggcctgcggacggcaccgacgagcaggtcgccaaccagttcgcccgcaaggtggtcgacgcgctgcggcaggtgctgcaggggccgaccacgcttgagccgaagatcgagatcgacctggatcttcgccccgaaggcaagaacggcccgctgattcgctcgtacgcctcctgccgggagtactactcgtcatgggcgaacacgtgggaacatcaggcgctgctgcgcgcccggttcgtcgccggggaccgggcgctcggtgaggatttcctccacgacatcgcggacccgctgcgatacccgataagcccgctcaccgacgcccagctcggtgagatccgcaaactcaaggcgcgcatggaagccgaacgcctgccgcgcggcgtgaggcgcgacaggcatctcaaactcggcaagggcggcctgtcggacgtcgaatggaccgtgcagctcctgcaactgcagcatgccggcaacaacgcctcgctgcggctgaattcgacactcgcgacgctggacgagctggaacgccgcaggttcatcgaccgcggggacgcggcggtgctgcgcaaggcgtggcgcatgtgcacggcggcccgcaacggcaactacctgtggaacggacgcgtctcgcaggccgacatcctgcccgacgacatgtattcgctgggcggcatcgccgtgtatctgggatacgatgcccaccgtgggcagcatttcgaaaacgacctgatgggaacgatgcgcaaggcccgcgacgtggcagagcatctgttttatggacgctgatatgagacggtcgtgtgtgtcgcctgtgaaaaatcagaaatctgcattatagtcggataggtcacttcagtggccaccttatccgcttcacgcatgaaaggtgagctgtgtcagtcacagaggagccggcggagacgccgttggtcggtcaaagcgtcatcacgctggatacgctttccatttcccagattcgagatttgctgcacaaggcggcatacatcgatgcgaaccgcaaacgcgtggcgcatacctgcgacggcagggtgttggccacgcttttttatgagcccagcacgcgcactcgcctgagcttcgagaccgccatgctgcggctcggcggccaggtcatcgggttcgccggcgcgcagctcgcctcggtgtccaagggcgagtccatcgccgacacgctcaagaccgtgtccaactacgtggacgtggtcgccatccgccacccgaaggagggagcggcgctggtcgcctcgcgcgccgcgtccgtgcccgtgatcaacgcgggcgacggcggccacatgcaccccacgcagacgctcgccgacttggcgacgctgcaatcgcgcttcggtcgtgtcaccgacctgaccatcggcctgtgcggcgatctgacgttcggccgcaccgtgcattcgctgatcgagacgctgtgccgcttcggcaacgtgcgtttcgtgctgatcagccccgacgagctcaagaccccgcgctatgtgatcgaccgcatcaaggcgacgccgtcctgctcctacgtggaggtcaaggacctcgtctccgtgatcggcgacctcgacgtgctgtacatgacccgcgtgcagcaggagcgcttcttcaacgaggatgactacctgcgtctgcgcgacacgtacatcctcgacgaggacaagctctccaaggccaagccgagcatggccgtgctgcacccgctgccgcgcatcaacgagatcgccgtcgaggtcgacgccgacccgcgcgccgcctacttcgagcaggtcaagaacggcatgctcatgcgtatggcattggaaagctcgctggtcggagaccagctgccgggatatgagccactcgaccccaaggaggttcaggcctgatggaagtcaccagcattcaaaacggcatcatcatcgaccatgtgcccgccggcaccgcgctcaaggtgctggagtacctgaagatcgatccgtccaagacgcggctggcgctcatcatgaacgccgacagccacctgtacggcacgaaggacatcatcaagatcgaggatgaggagaacgtcaatctcgacgtgctcggcctggtcgcccgtcaggccaccgtcggcatcgtgcgcggcggcaagatcgtccgcaagctcaagcccacgctgccggagcacgtggtgaacatcatcacctgcgtgaatccccgctgcgtgaccaccaccgagcgtggcatcgaccagatgttccatctcgtgcattcgcagcgtcaggaataccgctgcgactactgcgacgaggaagccaagttctgacctcacgcccgtcgtttcgcggtttcggacgtcaagccctggcgaccgaaaccgcggtccagcgggtgcaaccgtcttcatcagggccaaccccacaaggagatgcatatgctgaccttacgcaacattcgcgtctgggacaccggcgagatcatcgacatggtgattccctcggccgacgcacgcaatcagccggaggacggcggcgtcatcgaaggtgacttcgacgccaccgggctgacggtcgcccccggcttcgccgatccgcacgtgcatttccgcgatcccggccagacctataaggaatccatggtgtccggctgcagggcggctgcgtcgggcggctacacgaacgtgctcatcatgccgaacactgttcccgccatggacgggcgtgcggtgaaggccggcgcacccggtgccgcggaggtgctggacgcaggctgcagcgacgtcatcgactacctgcagcattacgagcgggtgcacgacgtgtcgctgccggtgcgctacgacctgtgcgtatgcgcctccaaggaccgcgccggcgtcgaggcgagcgacccggccgactggctgcgccatctcgacggccatgacatggatggcaaggacgcgtggcaactggcccacccggtcaccgccatcagcgacgacggggccgcggtgacgcccggcctcctcgaccaggtgctcgccaacgtcaaggagagcggcctgtatctcatcgagcattgcgagcatcacgacaccggtgcggtcaacgacggcccggtctcccgcaagctcggcgtgccgggaatcccggaggacaccgaactgaagatcgtcgcgcgcgacatcgagaaggcgcgcgagaccggcgtgcacatccacttccagcatgtcagtacggccatctccttcgacgcgatccgcaaggccaaggcggaagggctgccaatcacctgtgagaccgcgccgcactatctggcgctgtgcgacgaggacctgctcgaatacggcacgctggcgaagatgaacccgcctctgcgatcggccgcggatcgtcaggcaacgattgccgcgatcgcggatggcacggtcgacctgctggccaccgatcatgcgccccacacgctggaggagaaggaacgcggcttcctggaggcgcccaacggcatcatcgggctggaatgcgcgtacggcgtgtgccacaaggtgctggtcgacgggggttacatctccgaccagcggctcatcgagctgatgagcgtcgcgccctcgcgcctgatgggccaccggccgaccgacgtcgccgcactgctcaacgtcaccgccccctgcgcgtccaagcgcattctggacctgtccgccgtggagcacccggagaacgtcgacctcgccatcctcaacacgtccgaggcatggaccgtcgaccccgagaagttcctgtccaaggcccgcaacacgcccttcggcggatggcatgtcaccgggcgtccgctggcgaccgtcatcggctccacgctggtattcagccgcattcactgacggcagattcgaaccggcccgcaaacccgccgtcagcggcgggacagacacatgaaaggaagcaccacgcatggatcgtttgatcgaagccattgaggaggcacagaaccccagcgtcgtcggactcgatccgacgcctgcgctggtcccgccgcaggtcgtggattcgttcaccgacgaggtgcgggaatccatcgaggatgagtccgaattgcccgcggcacgtctggccgtagcgtatttcgaattcaaccgggcgatcatcgatgcggtcgccgacatcgtgcccgcggtcaagccgcagatcgccatgtatgaggcgatcggcccggccggggtcgacacatacacgatgacctgcgaatacgcccagcagcagggcctgtacgtgctcggcgacatcaagcgcggcgacatcggatccacggccgccgcatacgccggtcatctgtccggagtcaccgacggcgacagcctgtatgacccctggcacgaggatgccgtcaccgtcaacccttatctcggcacggatggcatcacgccgttcgtcgaggcagccgcggcgcacgacaaggacatcttcgttcttgtacggacgtccaacccttccagctccgaattgcaggagctggagcttgccggcggcgagaagctgtacgaacgtacagcggacctggtggagggctggggtgccgacaccatcggacgccacgggtattcgcacgtcggcgcggtcgtcggcgcgacccatccgcaggagggcaaggcgcttagggcccggatgccccacactttcttcctcgtgccggggtacggtgcgcagggaggcaaggcgggcgacgtcgccgggatgttcgacgccgacggctccggtgccatcgtgaactcctcgcgcggcatcatcggcgcatggcgcaagagcgaggaataccgcgaggacatgagcgccgacgacgcgctcggcctggtggcgcgctgcgcccgcaaggccgcgcaggacatgcgcgacgacctgcgcgtcaacgtgtaccgatgaggcggtgaaccggcttcgggagacgccgccgaatcaccgcatttcgttgcgccacgagcgcgtcacggcatcgtcatgccgtaatcttgaactgatggtcacatggatggaggagtgtatgccagcagccaccttcacgccggtcgatgatgtcgtaagccaagcgacttccgccggtttcttccccggacgacatgccgtcgacgtcaccgacgtgcgcaggctgtcggacggcgtattccgcctgacgttccgcgacggatacatcgccgcccacgccaaggcggcgcagttcgtcaacctgttcagccatgacagcatgatgctgatgccgcgtccgttcggggtgagtgaggtgcgcgacgatctggtcagcgtcatcttcgccgtcgtcggcaaggggacgcaggagttctcgcgtcttcatgccggggaccggatcgacgtgctcggcccgctcggccgcccgttcaacacgaaacgcgacgcacactatctgctggttggcggaggcctgggtgtgccgccgctgatctatgccgcgcaacggttgcaggcgtcggaaaagtcacactcgaccgcggtgttcggctacaggaacgtgcatttcgccgatgagatcgtgagctcttacgcacaccgcacgctgagcatcgacgagtcggaaggcaacgtcatcacgttgcttgaccgcatggaatcacaaggggaactggcggccggcggcctggagccggtcgtgctgtcgtgcggcccgctgccgatgatgaaggcggtggccctgtggacgaccgcgcggggcatcgaatgccagctcagcatggagcagcgcatgggatgcggatacggcacatgcgtgacctgcgtggtcgatacggtcgccgggcgcagcaaggtgtgctctgacggaccggtgttcaccgcccagcagctcggatgggaggcgtgaccatggatgccgtcaccgacacgaacgtatatgagccgcaccagtggaagcattcgaccatcgtcgccggcgtcgaatggaagaaccccgtcggcaccgcgtccgggacgttccagctcgcggcatgccgttggttctatgacgtgagccagatgggcgccatctgcaccaagggcgtgtccccagagccgtggcagggcaatcccggaccgcgcacggcggagacccccgccggcatggtgaactccgtggggttgcagaatcccggcgtggatcattatctggtggacgagctgcccaagctcaaggacctcggagccacggtcatcaccaatgtcgccgggcatagcgacgacgagtacgccgaagtcgtggcgaaactggccgactcgcgcgccgacatgctggagatcaacgtcagctgccccaacgtcaatcacggcggcatgagcgtcggaaccgacccggaggcgctgcaccgcctgatcgaccgcctgcgcaagatcacctcaaagccgatgatcgtgaaactgtcgcccaacgtcaccgacatcacgacgatcgcacgggccgcggtggatgccggcgccgacgcgctgagcctcatcaacacgctggtcggcatgcgcatcgacatccgcaccggcgaaccgatcctctcgaaccgcacgggcggcgtgtccggcccggcgatcttcccgatcgcgctgagctacgtgtggcgcgtgcgtcaggcgctgcccgacattccgatcatcggcatcggcggcatcgactcgggggagaaggcactggaatacctgtatgcgggcgcgaacgccgtcgaggtcggcgcggctgccctgtacgatccgacggcaccactgcgcgtggcccgcgagctcgacgacctgttggattcaaggcccgaacttgcggcgaagctcgcagcgggggagacttggagataaccatcaattgaggagggtattgtgaccatcgcgactcttgaccatcgcttcaccgaattcctgctggaatcgaacgcgctgaagttcggcgacttcaccctgaaatcagggcgtcaatcgccgtatttcatcaacgccggcgcgttcaatgacggtcgcaagatcgccacgctgggtgcgttctacgccgagaagatcgccgaggagatcaaggccgggcgtcttccgcacgacatcgacacggtgttcggcccggcttataagggcattccgctggccgtatccaccgcgatcgcgctgacctccggccacggcatgcaggtcggctacacgttcgaccgcaaggagaaaaaggaccacggcgacggtggcatgatggtcggcacgcagctggccgacggcatgaaggtgctgctcgtcgacgacgtgatgaccgcaggaaccgcggtgcgcgaggtcatccccaagctcagggccgaggccgacgtcgacatcgtcggtctggtgttgagcgtcgaccgtatggagaagacgaaggactccgacctgtccgcggtggccgcggtcgagaaggaattcggattccccgtgctagccatcgccaacgtgcgcgagatcttcgaggccgggcgcaacatcgtcacggccgacggccagccgtacgtgaccgacgccatcaagagcgcggccgacgactatctcgaacgctacggcgcctgattcgtatccggcgctgacgggctgcggcattgcatttgccgtagcccgttttcttatgggcgtgtcgccgttttacatcaagtacttgaggtttttagagttgacgatatgagcacaacgaccacatggcatacgattcgcaaggcgtcgatgatttccgggcttccggagtccacgctgcgctactacgagcagatcggcatcatcgttcccatcgcccgtgacccgagttcggggcatcgcgcctattcggaaagctcatcgaagagaaccggaacatcatcgagcaggtgaagcgcctgcagcccgacgccgaacaatggccggcaaccgacagatattcacaacaaaggagtgattgacatgatcgaaatgatgaaggctgcgatattcgtggagcccggcaagatgaccgtcgaggaggtgccgaaggcgacgcttcggcaggacgacgacatcgtgattcgcgtggtgcgcacttgcgtgtgcggttccgatttgtggttcttccgtgggctgagcggacaggccgcacacagccaggtgggtcacgagtccatcggtgtggtcgaagaggttggcgcggcggtcgaatccgtcaagcccggcgacttcgtggttgtgccgttcccgtacagttgcggcaagtgcccggtgtgcaaggccggctttgaatccgtgtgcccgcacggcggctacttctccgcctgtcaggccgaatacctgcgcgtaccggaggcggacggcactgtggtcaaggtgcccggttcgtcggaagactacgatgacgcgacgctcgcttcgctgctgaccatttccgatgtgatgtccaccggttatcacgcggcggcttctgccgatgtcaagcccggtgacaccgccgtggtcatgggcgatggcgcagttggcctgtgcggtgtgattgccgccaagatgcgcggtgccacgcgcattattgccatgagccgtcacgaggatcgcgcggcgctcgcctgcgaattcggtgcgactgatatcgtgcccgagcgcgatcaggccgccgtcgacaaggtgctggggatgaccggcggctatggtgccgacgctgtgctcgaatgcgtgggctccaagcagtccttcgacacggcgatcggtctgatccgtcgtggtggcgtgatcggccgcgtgggcctgccgcatgatgtggtaatcagcgccgaaggcacgttctacggcaacatcggcatcaagggcggtccggctcccgtgcgccactatgatcttgacgccggtctgctggacgcggtgcttgaggggaggatcaaccccggtcgcgtgttcaccgccgagtacgacctcgaccacatccaggacgcctatgaggccatggaccagcgcaaggtgattaaggcgctgattcgcctctaggcgaggcagttgtatcagcgaatcgttctcaataagaaacgtgcgaggattcctcacaaaacagcacaatcgaacatcaaggggatgcccggaattgcaacgttccgggcatccccttgttcgttttggcctcagcgacggctcgcacttttcttattgagaaccgttcgctgaacacccggcgcgcgtctactgcgccgtcgaggtgcccactgaaacgagtcgctgattcacgcgggtctgaacctcgatatagtactgctgctcctcgggggtcagcgaattctcgtcgatggcgtcgagcttcttcatggcatcgttgtacttgaccattatcttcgcgtagtcggccgccatgctcgccgggtgcccgccggcgttgtacttctccatgaagtcggcgtactcgttcatcagcgactcgtagctgtccatcgcggccttgaaatcggcgtcggagctggatccggtggaagcgtcgccggaacccgaatcaccgttgttttgcgtggcgccgttcccggacgtgccggaagtcgaggagtcgtccggggcgaagacgtaaatggccatgatggagtcgcccttggaatcgtagcggatatggaccgagtagccggcggcgttcttcgcgttgaacacggaggagctcttggagtagtcgacggtgaatcccttctcctgcagagccttgacatagttgtcgtacgcggtggcatcggtgccgcacaccttgatgtagaacgcgctcgagctgtccttctcaatcttacccttggcggattccggcttgggcagctgactggtcagatcggtcgtcggccatgagtaggcgtcgcatttggccttcgcggcttccttcgcggcctgttccgcggcgtcatgagaggccttggcctcgaggccgttgcgtacgacatccacgccgccgacgatcagcgccaccacggtgataccgaccgcgacccaggcgagcacgcgcccctgcgccttgccgtccttgcgggttgtgtagacggcgaatccggacaacaataccggcaacagcgcgaagaatgccaacagaccccagctgttcacaccgatgaaggtgatcagcaggaacaccgcggcgacgatgatcgcgaacaccgccagcttggaggtcttcttgttacggacattgggtgcgtcgggtgtattgggagtgttaggagtgccggaggcgatggggatgacgcccggcgtctgcggcggcacggtgttccccgcgggctggaccggcatgggctgagtgggctggacgggttgcggccccgatccttggggtggctgtggtgtgaaatcggatgggttcgtcatggtctgctctttctcttcaatcgcgcgtttatgcgcggacactggtgacatcgcccattgtcatgggcgatgcggcggcccgtcatcagttgccaactgaatttcggaaattttttccgcatggatgattccggcaccggagccgtgtcgcacgccgccgcgccatgtagtctgggcacagtgaaacgaacgggccagtcgattgacgctcccgacgggagatctcccggcggtccggcatgtgaagacataccaagggaaggcgaggcatgaacgtcaacgatccggcgcatctgaccgaggaaccgcatgaacgagccgacgctgctcgacgcggactgaccgcggcgctcgggggacgacgacgattatggacgaacggcagaccatgcacgccatgatgctcgacgacgcctactgcgtcgaacgggtgctggcggacggcgcatacggcgtcaccgaaatggtgagcctcgatggagccgggccgttcgtgcgcaagaagatgccgctgcggctggcgaggcggcgcgcatcgccatttcgctcatcctgcgcgacgagaaggggaacttcgtgttctggcgtagtgagtatgtgcgtaaaccggacaaaggcgaatcccgcgcgttctccatccagatctatggtctgcccaagtacgcctcctatgaggcgtacgcctatgcctcgtagatgtttctcctttggaagaggtacatttgtcttgttgcggagagctatctgcgttcaatgaggtgcctgaaacatgagaacccgagtatcaacgttgcaatgacggcgtttgtactcgagggttcccattcggtacctctctgaagacagtcagcattctgcaggaggtcgaatgtacctcttgcaacgaagatagatgcttgcaacggtccgaatatgtcccttgtcggccagttggcgtccctacaatgggtgatgacgtgacgcgtcgtaggagatttgagtgaaggggtgcccgatatgcagcggatacgggacgatgcgagcccggagtcgatcgaagtgcgcggcgcacgcgtgcataacctcaagaacgtcgacgtcgacgtgcctctgggcgaactggtcggtgtggccggcgtctccggttcgggcaagagctcgctcgcactcggcgtgctgtatgccgaaggctcacggcgctatttggaggcgctgtccacgtacacgcgccgccgcctcacccaagcgagccgcgcgcaggtggacgaagtactgcacgtgcccgccgcgctggccctgcaccagcggcccgcggtgcccggcatacgctccaccttcggcacgatgaccgaattgctcaacagcctgcgtctgttgttctcacgtctcgcctcacatgtgtgcccgcattgcggtgcacacaacgaaccgactctcaacgtggccgccggcctgcccatcgtctgcgcgaattgcggcaaggaatttcacgcgcccggcgctgaatccttggccttcaactcggccggcgcatgcccggcctgcgccggcaccggcatcgtgcgcgaggtgaaccgcgcggcgctcgtacccgacgaatcgaaaagcatcgacgagggcgcggtgctgccatggggttcgttgatgtgggacctgatgaaacaggtcgccggcgcgatgggcgtgcgcaccgacgtgccgttcaaggacctcacccccaaagaacgcgacatcgtcttcaatggcccggccgtcaagaagcacatcctgtacaagccgaagaaaggcgacgacttcgccgaactcgacttcacgtatttcaacgccgtgtacaccgtcgagaatgcgctcgccaaagccaaggacgagaaggggctgaaacgcgtggcgcggttcctcgaggagaaaacctgcccggattgcggcggcacgaggctcagcgaggcggcgcgcgccccacgggtgggcggactgaatctcgccgaggcgagcgcgatgaccttggacgcggcggtggactgggtgcgtggcgtgcccggatcgctcggggccgacatgcgcccgatggcgacgaacatctgcgaatccttcctcgatgtggcccgtcggctgttggagctcggactcggctacctcgcgctcgatcgcgccggagcgaccctgtcgaccggcgaacgccagcgcgtgcaattggcccgtgccgtgcgcaaccgcaccaccggcgtgctctacgtgctcgacgaaccgtccatcggcctgcacccggcgaatgtggacggtctgctcggcgtgatgcgcgacctcgtggtggatggcaactccgtggtggtcgtcgaccatgatgtgcgtgtgctcaaggcatgcgatcatctcatcgaaatgggtccggtcgccggtgccgaaggcgggcatgtgatcgcgcagggcacggtcggcgacgtggcggcgaatccacgcagccgcatcgcgtcgttcctggccgatggcgaaagtgtccgtgaacgcgggtgcatgcccgtctcgcatatgttcgaccttgggcatattcgcatgacaaccagtcagctgcatacggtcaagccgctggatgttgatattccgcgcggccgtctggtggcggtgaccggcgtatccggctccggcaaaaccacgatggtgctcgaatcgttgattcccgcgctcaaggcacggtctgcgggggagaagccgtccgagcatgtgcgctcgatcgacgccgacggcatcgagcgtgcgaacctcatcgacgccacgccgatcggcgcgaacgtgcgttccaccgtggccacctacgccgacatccacgacgacctgcgccgcgccttcgcccgaagcgacgaagccaaggcgggcggttggaaggccggcgacttctcctacaacaccggcagactgcgctgccctacatgcgacggcaccggttcgatttcgctcgacgtgcagttcctgcccgacgtcgacatcgaatgccccgactgccggggctcccggtatgcgcccgaagccgacgcgattcaccgcacgaccaaggacgggcgcgaactcaccctgccgcagctgatggcgatgagcgtggatcaggcgttggccgtgaccgtcgacatgcgcaaggtgcatgcgcgactgaccacgctgcacgatctgggtctgggctacctgacgctcggcgagccgacgccggcgctttcgggcggtgaggcgcaacgcctgaagcttgccagcgaaatgggcagggctcagtcggacgccgtgttcgtgttcgacgagccgaccatcggcctgcatccgctcgatgtgcgggtgctgctcggcgtgtttgaccgactcgtggcgtccggcgcgaccgtcgtggtcatcgaacacgacctcgacgtgatcgccaacgccgactgggtgatcgacatggggccgggcggcggcgaaagcggcgggcgcatcgtcgccgccggcacgccggagcagatcgcggccgatgcgaacagcatcacgggccggtacctgaggtgactgtatccgtgggcgacccacatggcggtcatgcacggctgcgagggatgccgcgcgagtaggatgaccgtccgtggttcaggttcatggcatcagacgcgcgagcgcggacgcgaaataccggcagatgaccggtcagccggtcaaaccgttgattctcagactgtgtctgccggcggtgatctccaatctggtgaccaccgcctacaatttgaccgacacttttttcatagggcagctgggcaccgcgcaatccggcgcgatcggcatcgcgttctccatcatgaccgtgatgcaggcgctcggcttcttcttcggcaacggcgcgggcaactcgatgagccgcgaactcggcaaacagaacaacgagcgggcatcccggctgctggccgtaggcttcgcgggcgcggtgatctcaggtctgacgatcgccgcgatcgggctgctgacgttgcggccgctggtcgtcatgctgggttcgactcccacgattgcgccgtacgcggtgcaatacctgacaccattgctggtcgccgcgccctgcgtatgcgggtcgttcgcgctcaacgggctgctgcgctaccaaggccagtcggcgttcggcatgatcggcttggtttcgggcgcgctgctgaacttcttgctcgcgccgctgctcatcttcgtggcgggcctcgggatattcggcgccgggctggccaccgccatctgccagacggtgagcttcgcgattctgacgacgatgagcgccagattcggcgtgatgaaactgtcgttgcgcaactgccggccggatgtgctgctcatgcgcgaggtggccggcggcggcctgccctcgctgattcggcagggtgcgggctcgatctccgtgacctgcgtgaacattgccgccaacccgttcggcgacgcggccatcgccggcatggccatcgtgatgcgcatcatgttgggcgccaactcggtgatcgtgggcctcggccagggcttccagccggtgtgcggatacaactacggcgccggcctgtacgcgcgcgtcaaggaagggtactggttctgcgtgcggctcgccaccggcgtgcttgtggcgttggccgcgctgctgtggatgttcgccccgcatctggtcgagatcttccgctccgacccggccgtggtggcggtgggtgtgtccgcattgcacattcaatgctgcacggtggtgttcaatggcttcaacatgatgggcaatatgatgacccagaccatgggacgcaccggcatcgcctcgttcctggcattgtgccggcagggcctgtttctggcgccgatcgtactggtgctgccgttggcgttcggcgtgctcggcgtggaaatggcacagtcggtgtccgacgtgctcaccttcgcggtcaccattccattcatgcgccgcatcctacgcgaattgagctgattcgccgccccatgcgcaggcgatggcgacggcgacgggtcggacggattcgataaaatgcattgtgcatacgttttcaacagcgtttcgtcgcggcatcgggcagtgatcgccggacggcgacgaaccgacgaaggcagggaggcatacgaatcatggaacggacgaacggcaaacgcatcgccatcgtgacgggcagcgccctcggactgggctatgaactcacgcgacagctcatcgaccgcggatggttcgtcgccggcatcgacttcaacgccgaacgccagaccgaactggccggcgaattcccccggggctcttaccgcgggttcgtcggcgacgtgtccgacgaggacttcgtcaaagcctcggtggccgagatcgccaagatcgggcacatcgacctgctgatcaacaatgccgggcagccctcgttcaagacgccgaccgcctacgaggccgccgacgtggacaaatgcctcaaaggcctcaagggcatgattctgtggtgcgtccagacgctcaaggcatgcgacgaacagaacctcaaaatcgccaacgtgatgagcaccgccgctacgcgcggcaacgccaacgaatccgtgtactgcgccaccaaatggggtgagaaggggtatacacagagcctcaaggccgcgtacaaggggtcgagcgtcaccgtcgtgggcgtgtaccccggcggcatcgacaccgacttctaccgcgagagccacgactacgtctcactcgacaagcagcacacgttcatgcccgccgccgatctcgccggcgtgatgctcgacaacctgctcagcgaggcgcgcctcaccgtctccgacattctcattgagcgcctgtaccgttgaccatggcatcggcgcgcggcaatggcaggcaatcccggcgcaggcccgcagccggcgacatcgagtcgctgtaccgcgcgctgtccgcggaactgagcccgaccggatggtggccggcggacaccacattcgagatcatggtgggcgcggtgctcacgcagaacaccgcgtggggcaatgtggaccgttcgctcgcggcgttgaaggcggagagcatgctcgacccccatgcgttgacggtcgtggagccggagcgtttgcaggagctgattcggccgtcgggcttctacgtcaacaaatccaagaccctgcgctcgttgagccgttggtatgtggagcgttgcgacgcctctcccgaaggagccgacggcatcaccgacgccgagctgcgcgccgaactgctcggattgttcggcatcggcggcgaaacggccgacgatatgatgctctacgtgttctcccgccgcacgttcgtggccgacacctacgcacggcgcttgttcgcgttcctcggcttcgatgcgccggccggatacccggcgttccataaggcgtatgcccccgtggtgctggacaccgggctggacgtcgccgaccttcaggaattccatgggctcatcgacgagttcggcaaagcctaccgcgacgatgcggcaaaaaacgagtcgtttctccagtcgtggcgaccgggagaggctgctcctcgcccgacggagtgacgagacggtgccacgggtatgttgaaacgagttatgatggacaatcatgagcttgattgagatgatgattctggggttcctttcggagcgttccatgtgcggctacgagttgcgcaagaagatggagcagctgcaggggtacgcgcgcaaattcagcgacggcgcgatttatccggcgaccaataggctcgtcgaagcgggattgatctccgaacaggcgtcgattcgcgacgggcgccagcgtcgcgtgttcaccctgctggacgcgggtcgcgccaagttgatcgacgagcttaaaagcaccagtggtttcaatctcaccgatttcacccggtggaccgtcgtgcttaccttcctgtccgtcgtgccagacaaaaccgaccgcgacgcggtgttgcgccgccgttacgaattgctcaacggccacgacgtgcatttcttctactgtgacgcgggcaatccgttgagcgccgagcagatcgacgacccgtaccgcaagggtatcatcaccgtgcatgacgcacagatcgccgccgaactcgaatggctgcgttcgatgctggagatgtaaggggcaatgggtcaattcgctattatggttggccagttggtcggcttcttcatcatgctgatggtcggatacggatgcgtgaggcttcgcttctacggccagaccgcgctcgacggcatgtgctcgctgctgctcaacgtgcttatcccgttgctggtgttctcgaacgccatggcgggtgcggaccgcgcgcaggtcgaggccaattggggcgccatgctgctgaccgcggtgatgtacgccctgcttatcctcgtgttccgcttggtcgcgtgggcgttgcggcttaagggatcacgtagccacgtgttccaggcggcactgatcttcggcaacgccgggttcatcggcattccaatcatcatggcgttatggccgcacgagggcgcgatctacgtcgcgttgatgtcgatcgtcgatcagacgctgctatggacgtacggcgtatggctgtgcgagccggttcccgaacccggtaccgtcgcatcacccgacgccgccggccggcccacgctcggcctgcgcgtgcgcaatctgctggggaggttcgtcaaccccgcgttcatcggggtgatgctcgccttggtgctgatcatgctcggcgtgaggattccctcgatcgtcctgactccgctgcgcaccatcggaggcatggccacgccgatgtcgttgatctacctgggcggcctgttcgcgctgaccaaatggtggggcgtgctgaaacgctacgaactgtacgtggggctggtcgccaagatgatcgccttcccgctgggcctgtacgcgctactcaccgcggccgccggagcgctgccggagctgccgatcacccacgacatgatcatgatgatcacgttggtggccggcctgccgaccatgaccaccatcgccatgttcaccgcccgcaggaacaacatgcccgactacgcggtcggcttcgtgctcgtaagcacgctgttctcgctgctttcgctgaccatcgtgtcggcggtggtgttctgacgagcgcgagcgacagtccttcgattcaacgcaacgcgtcgtattcggcctcgaccggctccagccactcgttcgaggcgccgtccaccgcgttcatgatggcgatatgcgcgaagtcggaatccggcgcggccccatgccagtgcttggtctccggcgccacgtacaccacgtcgccggggttgagctcaactggctccttgccccactcttggtagtagccgcgcccgcccacggcgatgagaatctgacaggccttgtgatggatatgccagttgttgcggcagcccgcctcgaatgtgacgttggaaacgttgacttccttgcccgagatcagcggtgccagatagctctgcccaatgaaatacttggcgtatgcggcttcccgatgcacggccgcatccgcaccacgcccgccgcgacgccctgctcgacgaacgtttccgctgaaacgacttccggtgaggtcgggttcgctcgaaggtgttcggtccaccttcagttgcgtacggtaaaaccggcatccgcgatgcgttcgcgcatgttccgcgcaatcgatatgcatcgggttcgcgggatgccggctttcatgccgatgtccgccatgtcctcaacggtgatgccgcgccccttaccattgaccgcggtggtgtgttcgccgttgataccgggattctcggtaaggtcgtacgcgggggagaggctccaagcgccggactccgcatcatgcaggtaggagaagttcttcgcgtggtcgtcgcgattgccgatgaacacattgaaacacatgagtcgatacaatcgttcgcattccttgatgccgccggtcatgcgcatggtcaatcgcatcagcaaggcgtagtccagattggcgatgcggtgtgaagtctccaacaggccgccggcggaaaccatgtgcaccttgccgatttcgccgttcgtgagcggtatgcggtcaaagcgcttgacgccaaaatagcctgcgcatcgacgtgaagggaacaacctggtttccggcatgtcgattccgcaagtgcgtgcaagattcgatatgtggtattccatctcgccggtatcgggtgcgtccacggatgaggggaacttgatgatccattcctcgccattgattgtggtgaggattttcgggcgggctccgcctgacgaaccgccaagaacaaacagctggtcgaggtcattcgagaagtcggcgctcaacacattcaggcattcctcggcgagtgagtcgagatcggggaatgattgcatgtcatcgtcgattgttgaagcgggttcgtattccagtgcgcccatgccgccatgacctacgatcgatagacgcgccagcgggccgaccgaatacgggtcgatgccatgttgacgcagcattcggtcggtcagcagtcgtccccatccgtcgggcatgctgtcgtcgaacacgccgaacatgccgttcagcggatctctttgggcgacgaacacgccatctctgagcggaaggcttatcgggctgatggaaaaaccgtgcgtcagccaggtcttgtcgtaggcgaacgccagtgtgcgggaaggtgacatggtaagcattccgacggtattgcctgcgagcagcacgcgcacgcggtctacatccagcagcggggtcatccgatgtcctttccgtggcgcgtcgctgtgaccacgtcatcgatcgagcggtaatacggctgggagaacagtgcgtcgaaatcccgttcgcagtccaaggcgaaggcgatgccgaccagtgcgttcagtgatatctcatggagttgttcgaatcgacgaatcgacccgagactcacccctgattttcgggcgagatcggactgcgtcatgccgtgttccttgcgtctcatggtcattcgccgggcgataccggccattacttctccgggaagcggctcatctaacaaatcatacatactaatattttagcaatacttatgaaattatatagtaattactactatattggtagcattcatcatgtcgtgtcagtcctatccggcgcttgtaggtggcctttgccagaggacggcggcggcgtcaagcgcatgctggatatcggctgcgggccgggcaacagcacggccgtgctgcgcgaacgctacccgcacgccgagattctcggcgtcgacagctcgccggacatgatcgaggcggctcgcaaggcctacccggacatcgatttccagctgtgcgacgtgtcgacgcatcggtgaagttcgtgacgttcatcgacgcgatgctctcgctcgtggtcacgcaggacgttctgccggaggccgagggcgcgcaacatgccgcacaatcctccgggctgctcggcatcggactcggagcgttgaccatgatcatcggattgtggatgctgctgcgtcggcgctgggccgctgtggattcggtgctcgattccgagcaatagcggcgcattggccggcaatggccgactgcaggaggggcagaggtcccgttttccgatgtgtacgaacgtacatatacgagggggacagcatggaacccgcatgaatgctatgattgccgatatgccatcccagtcatcccgagtcgaccccgagcgacagcagcacatcatcgacgccgcgctgcgcgtcatcgcgtcacgtggagtggcaggcacctcgcatcgcgtcgtcgccgccgaggcgcacgtgcccctcggctccatgacatactatttcgacggcatgcacgatctgctgcaccaggcgttcgaccagttcgcccgggcctccgtactgaaattcgccgcgcgcatgcagcccgcctcgaccgtcgacgaagcctgcgacgccatcgcgctgagcatcgaacgagacatgctcggtaaccagcgcgacctgaacatcaaccttgagttctacacgctcgccgcgcgcgacctgtccttccgcgacatcagtgaccgctggatgtcggcgacacagaaggtcatgggccggttcttcgactccgagaccacggtgctgctcgacgcgatgatcgaaggcctgacactgcaccgggcgctgggcggggaaccacgcaacccccagtccatccgcgacggcatccggcgcatcatcgaccaccggcgctgacggcaacgggagtgcgccaaaatgcgccatccactgatggatcacataattcaggaacacggacctataatgggaagcaggatccatgaccaatccgaacgcgccgtatgccgtccagccgcagcaatccggatttcaaccgcagccccagttccagctgcaacagccctatgttccccggccggtcgcacccctgcgtacgcagcgcggactgctgaaatacgtgctgctcggtctcgtcacgttcagcatctacgacatctggcagatgagcgaagtgggagacagcctgaacctgctcgcgttcaaacgcgacggcaaacacacaatgcactactgcctgatgttcttcctggtgggatgggtcacgctgggcatcggctggctggtgtggtatcaccgcgtatccggccgcatcggcgaagaacaggccgcgcgcggtctgcccgtcacggtcaccgcctcgacattctggctgtggggcatcctcggctcgctcatcgcagtgggaccgttcatctatatatacaagctgctgcacgcgatgaatgacctgtccgcggactacaacgtgcgcggcttctgaacgagacacggatcgaaatcgggctccccgccacagggagcccataatcgcattcagtcaatcagcttgtaaccgtggtcggcaaccacggacttgagcttctcgatatacgtctcggcggccttcgacagtttggcgcgctcattggtgacccagcccaccagcatcgtttcgtcggtgtccaacggcacggtgacgatcttctcgttgttcaggtcgccgttgtcgatgccggtgcacaccgtgtacccgttcaggccgatgatgaagttcaggatcgtcgcacgatcggtcacgttgatctgcttgggggagtactccggccacacggcctcctcagcgaagaagaagctgccctcctcgccctgctcgtactggatgaacgggaacggcttgaggtcgtccatcgtgaccttcttcttgccggcgagcgggttgttgcgcgagatgaacacgtgcagcggcgcacggaacagcggatggaactccagatgcttctcgcgcagcatcttgccgatcacgtccttgttgaagtccgacaggtagatgatgccgatctccgaaagcatgtttgcgacctggttgatgatgtccttcgtgcgggtctcacggatcgtgaactcgtactcgtcggacttgatggagtcgatcatctcgacgaacgcctcgacggcgaacatgtagtgctgcgtggacacggagcacagctgcttgcgcggcttcgcgttcttgtagcgctcctcaagcaggtcggcctggtcgagcacctgacgggcgtaagtgagaaattcggcaccgtccaccgtcagggcgatgccctgcgaggaacgagtgaagatctcgatgccgagctcgttctccaattccttgaccgacgagctcaacgccggctgggagacgtacagttcatgcgacgcctcgttcatggatccgcactcgacgattttcacgatgtatttcagctgcagcagtgtcataagcagcatttataaggccgaccatggacgaaaccattgaaatcattgggattgccggcatttcaccaggtgcgggggtataagctcaatttatcatgcggcgggcttgcggtgcggtatgcgcaaggcacgctctcaaaactcgcagatacaccggacgactgacgccttttgccccatatctgcgagttttgagagcaccgaatccggttattcctacagcctcacaccgagcgaagcgagcgattcgcgggcctggagagcattgtcgaacagaagaccgtggataccgacctcgttggccccgacgatgttcttcgccgtgtcgtcgaagaacacgcaatgcccggcttcgaggccgaatcgttgcagtgcgagctcgtagatgtcggcgttcggcttgtgcatcttctcgatgccggagaccacggtgtcctgcagcagttcgccaatctgcgggaatttctcgaacgcgatgtgaatcgtctcatgagaccagttcgtcagtccccacacaccgtacccatgccgcttcaggtcgcgcagcagatcttccatgccgggcagcatgcgcggcagggcgtcgccgtaatgttcgatgtaataggcgaagatcggagcgatgtcctcgccctgctcccgcaccacgtcggggtagatgtgagagaagtcctcgccggcgtccatgcggtcctcatagcggaagaacccgtgcgggtcgtcgggtgcgcatatcgcgtccaccgtgtcctgggggaaatgcccggtcaggcatgcgcgggtctgccagtccagcaggacgccacagaaatcgaaaatcacatcggtgatgggggagttgctcatgatgctcctcaacgttggaatagggggaataggatagtgtctgatttgttgatccggacggaataggtctccggccggcgcagtcgcgcaagcggtcgggatgcgtcgacgccgggtatcatgcgataccggcctccgcatcccgaccgccctcgcgcccttacgacagcagttccgcgaaagtcgcgggaatcatgccgatcacatcggatgcgacgatgggatgccccagcttggtgcgcagatgacggtcatcggaaccgtaaatcgtcgggggcgtgaacccgcgctgatccgactgcgacgcctgagcggctgcatatccgtgcaggtaggcagcgcaggcggcgacatcgggagccgaaacgtcctcgtcgtcctgttgggcgagcaacgcccccagcatgccggcgagcacatcgcccgcccccgcggtgcccagccacgccggggcgcggccggagacgaccacacgcacatgctgctcatcatccgcgaatccaccctgcgcatccgactcccgatcggtgtcggccggctcgcccacgacaatcgtgaccgcacctttgagcagcacggtggcgccggtgagctcatgggcccgcaacgcccaatgcaatggctcgttctgcacatccgacgcatccacatcctcgcccctggcggtgagcagcgaggcgagctccccggcgtgcggggtgatgacgacctgcggcggcacctcgtcgggcagcaggtcgagagcgcccgcgtcgaccaccagcgggggcatatcataggcgaggtcatcatcgtcatccgggtcatcgtcagaggacaacgcataatgcgtcagaagcttggcgatggtctcacgctggaaatcatcatcctcggtctcacccgtcggaacgccggagcccacgacccaggcctgcacgcgccccttgccgagtacggcctccgggaccgcggcgagcaccatatcacggcacacctgcggacccatgtagcggatcatgccgatgtttgtcttggccgcggccttgcacgacagcaccgcggcgccggggtatcgttcggagccggtgatcagaccggtcacgccacgtaagtacttcgtgtctgcaagccgggggagtcggacggtctcagccgcgttgtcgccggaaaccgcctcgacgaacggcatatggccgtcgatgtcgaaactgaagtccaccagcgtcacgcgaccgcaggcgtacgccgcgggaggcagcataaggcacggcttcagggcgccgaacgtgaccgtgacatcggcagggatatacgggcctgtgatggcaccgtcgtcgactcccacgccggaggggacgtccaccgcgacgaccaacgggaactcgccggtcgaatcgccggcgggaagagcggtgcggtcggggatcgtgccgtcgacgcccagcgaggatgcgaccgtgcccgcgatgccgtgcagcgccccgctcaggccgatgcccgtcatcgcgtcgatgatgacatgcgcgtgctgggcgagttccaccgcggcccgaagcctttcaccggcctctccagcgctgaagccggcagcgcaccccggaatctcggaggccgggtcgaggatcagcaccttgccgccggcgcggacgaatgcggcgaagccctcgccatgcagcgtgcggccgaccgcgacggcggtgaccgaagcgccgttgcccgccagcatcgtcgcggcgaacagcccgtcgccgccgttgtcgccgctgccggcgagcagcacaatgttcgactcctccaacgcgacgccctcatcttcgagcatttcggcgacaacatgggctgtggcggcggaagccatcctcatcagggggacaccgttctcaagcagtggccgttccatctcccgcacgtctcgcgccgtgaaggcggcgtgacgaagaacgtggagcctgttctcatctgtctgccctgccatgatgcatcctccttggttcatggatcgtttccatcaatcggactttgcccgttcctccactctactcgctgtcgagccgtcgcggcgacgcgtctgcgataccgttacacgagttcgcgcgcgcgagcggtacgagcaatcgcggcggacggctggaccgtggtggctctcgcgtgacggctgcggcggcgacacgcggaagtgtcgccgccgctgtacttcaagcgctcgaagcggctaccgtgacatctcaaagcgagtcataatgaccgccgatcgcagtcaaaccgcaaggagatatcatgttcgatgagctgaaaagccgcatgaacaagttctggaacgatgacaggacgctggcacagacagacccggaattcgtcgagctgttctcgaacttcgcttatgacgaggtcgtcaacgagccgggagcgaatcaccccgatctggacgacgccacacgctccatggccattctggcggcgttgatcggatgccagggtctcgacgacttcgagctgatggtgccggtcgcgttcgaatccggcgtcggtgccgtccaggtcaaggaaatcgtctaccaggcggttgcatatctcggtttcggccgtgtactgccgttcctgaagaagaccaatgagatactggaggcgaagaacatccacctcccgctcgaaccgcaatccaccacgacgcccgaaacccgcgctgaggcgggcgagcaggcgcagatcgacatcttcggcgagcgcatgcgaggcttcgcgcaatcagggccggagaagacccgtcacatcaacaagtggctggccggcaactgcttcggcgactattacacgcgcggcgggctcgacacgcgccgacgcgagatgatcacgctgtgcttcctggccgcgcagggagggtgcgagccgcagctcacctcccatgcggtggccaacatgcgcgtgggcaacgacgagaggttcctgatcgccgtcgtctcccagtgcacgccgtatatcggttatccgcgcacgctcaacgcgttgcggtgcatcgccgacgcggcggcgaaggcgtgacagtcggcgcgggccgtcaggcttcctcgtgccagtgcgggttctacgcgaaggaacgtccctcgggattgtccatcgcggcgatgcgcacgatcgtcggatccttaagcatctggttggcgtggcccaatgggctccacgcctcggtgatgatgccatgcgcctgatcgtaggcgcgctgcccggcctactggaagaaggggtacagctctacttggttgacggccggcgtgactccggtggagcggatcagcaagtcgatatgacccggcaggaagttgctgacgccgatgtgcttgacgatgccctgcttctgcgcgtcgacgagcgcctgccacgcctcgacgaactggccctgcgacgggttgggccaatgaatcagatacaggtcgatgtagtcgagtcccatgcgggccacggactcctcgatcgtgacgcgcgcctgatcgtactggtgatgacggcccggcagcttcgacgcgacgatgatgtcctctcgcggcacctctgattcgcggatagccttgccgaccacgccctcgttcggacatctatctgcgtttcgaggggttggtgcccgagtagagccgggccggaaaccgcatgattccaatgcgggatgtccccgcatactccggatatcgcgtttgggcaaccccttgaaacgcagatagatgttccgagagcgcgagatcaacccctcgaagcggagataccgggtatcagcctgccagcggaggcaatgaggcacggtaaaacgggttataggccagaagtgtgtgtccgggataagccgtcacgtcttgtgctgactggtgtgtcgccgggttgaatgtgggtgccgggaccttcggggccggcaggcggctgcgccgtatcgcggtggcgctcatgcgcgtcgggggcggttcatcgcggaacacgtggtggaaccgtgttcgtgaagttcatgtcccccaagcatgacaaagcgggattccagcgacctgtaatcgttgggatcccgccattcttgtcgggccggcgggatttgaacccgcgaccccttgacccccagtcaagtgcgctaccaaactgcgctacggcccgaacagtgcgaaaagcaccgagaagagaatttaccatatgacgtcaataacgcaaaacaagcgtgtcgcgactcgggtaattcccgactatcacctcgcaatagggagacaccagctacatagacggcatggcccatccaagtcttatccaagttccatctgcgcataccattgcagtgcggcagccagccgccccaccccggatacccccataatggatacgtctgcgggatgattggcgaacgaagcaccacgcgagtagactataggaatgtttgccgaagatctgaaacggacggagaagatgacagtggacgacatgttcgagcagtcggcgcagaagatgcgcgagcagggcatgagcgagatcgccatctcgcagttcaggcacgcataccatgtgtgggccagcgagaaggagagcgcgtggatccgcgaggacgccgtcgagccgctgcacggcgtgcggagcttccatgacgtgtacaagaccatcgatcatgacaaggcagtgcacgcgttcgccaagaccgcattcctcaagctcaacggcggcctgggaacctcgatgggcctgcaatgcgcgaagtcgctgctgccggtgcgccgccacaaggctcggcagatgcgcttcctcgacatcatcctcggtcaggtgctcaccgcgcgcacgaggctgaacgtgcctctgccggtcacgttcatgaactcgttccgcacttcggatgacacgatgaaggcactgcgacaccagcgcaagttcaagcagaccgacatcccgctggagatcatccagcatcaggaaccgaagatcgacgcggccaccggggcgccggcgtcttggccggccaaccccgatctggagtggtgcccgcccggccacggcgacctgttctcgacgctgtgggagtccggcctgctggacactctgctggagcatggcttcgaatacctgttcatctcgaactccgacaatctgggtgcgcgcccgtctcgcacgctcgcccagtatttcgaggatacgggcgccccgttcatggtcgaggtcgccaatcgcacgtacgcggaccgcaagggtggacatatcgtgcgcgacacggccaccggccgactgatcctgcgggagatgtcgcaggtgcatcccgacgacaaggacgcggcccaggacatcgccaagcacccgtatttcaacacgaacaacatctgggtgcgcatcgacgtgctgcgcgacatgctcgccgagcatgacggcgtgctgccgcttcccgtcatcatcaacaacaagaccgtcgacccgaccgacccccagtccccggcggtggtccagctggagactgcgatgggcgcggcgatcggcctgttcgaaggcgcgatctgtgtgcaggtggaccgcatgcggttcctgccagtgaagacgaccaacgacctgttcattatgcgttccgatcggttccaccttacggactcgtatgagatggaggacggcaactacattttcccgaacgtcgacctcgatccgcggtactacaagaacatcgaggacttcaacgaacggttcccctacaacgtgccgtcgctcgccgccgcgaactcggtcagcatcaagggagactggacattcggacgtgacgtcatcatgttcgccgacgcgcgtctggaagatagaaacgagcccagttacgtacccaacggcgaatacgtcggaccgatgggcatcgagcccggtgattgggtgtgatgtgtccgccgtacgaagaaaaaatacctatttttgacaaaatgcgagctgcacacaacaaaaccctctatcatgggatgtggtgtgcgtgatacccatgcatatttaattggaatgctaacgatacgtgaggactaatggcagagggatcgaacgggagacgccgcttttccgacaaatggggcaaacatgagttggatgtgttggccgtgctgtcgtctgcgtttccgcagtggctgacctcgcggcaaatcgcccagcgcgtcaaggcatatgccgactcctacggggagcttgccgatcaggccgcgaaggccgcgttcgccaagcagttccagcgcgaccgcgccaagcttgcggcaatgggaatcgccatcgagtcacgccagcctgaatactcctcgaagtccgagggacaggacttcgcgtcgtaccgactgcagctcggggacgagccgcgcatccgcctgcgcttcgagcaggaggatctgccggttctcgccgcggccaactatctcgcacgttcgatttccgtatcgtccacgcaatcgcagaccgtgacgccgcagcatgtgtcccgcaccacgccaagggtgccgcagacgcccatccccggcctcggattggattccatcgccccgggactcggcacgcagacgattccgccggctctcgtgcgcgtcgtcgactcccgccgtttcgcggcgacggtcgacgtggacggagagaacatcaacgtcgcctacaccgattccgacgacctcgccatgttcgtgctcgaacatcccggcgcagtgatcgtcagcccgcaggaggccgtcgacgccttcaaccgtcgtctccaggcggcgtcaaacatgatgctggccgacagatcgtcggacgataccggcagcgccacggtcgccacgcccaccatcaccagcacgacccccgagccggaggacgccgatcccaagaaaaaccaccagaagaagtccgggacctcgttccagaccggcagcgaggtcgaccgcagactgcgtctgatgctcttcctgtccgcccacctcggtgaggaattctccctcgcggaactcgctgagcgctttatcggcaggcccaagtcggatgacgagctcaagaaatacgtcaacgtgatccacaaagacatcaacacgctgaccacggtctccgacgacggcgagatggccggaagccagttcttcgacatcgattggtcgctgcttgacgccgaaggcatcgtgtccgcgacgaattcgctcggactggaacgcctcgccggcatctccccgcaatacctgagcatgctcaccgcttcggtgagctacctcgcgcattcgccgctgctgccggaggcgcagcgcacgcaggcggcctcgctgtatcagcgtctgcgccagctggtcaagccgggggagaccccttggctgagcctgaccggctacgagctggagcctcactgcttctccgtcgtcaagcgcgcgatctccaccgaatcgctgctcgacatggagtacacggacggcgcgggacggacccgccgcaaggtcgtcgccccctccaagatcttcgtggatgagggcgtctactatgccgccgtctggaccgacgtgctggactccactccggaggaccggcgcaagttcgtttcacgcgaccagctcatcaacaaggcgaacggcaagccccgcacatggcaggtgctcaggctcgcccgcatcgagcacgcggaggtcatcgctccggtcaagcgcgtggacattcccgacatgccggtgagcgagttgcgcaagtggagcttcgacaacggcactccggccgtgttcatcacggatcagccggatcttccgttcatcaagtcgatgccgggagccaccgtcgagccgtgcagcccgggcgagaaggtgcatatcatcgtgtcgtccgattcctggttcgtcgccttctgcatcgcccatgcgcgtcacatcaccgcggtcgcgcccgagaccctgcgcacgatgatcgtcgcccgtgcgcagcgcgagctcagcctcggcacacgtgaagaagacaccccggaagaggagtgatctcatgccctggtggatctggctcattctctcgctgttcatgctggcgatgatcgtggcgggcatcgcgtacgccgcccttcacggcttcagggcgttgaacggcattgcggagatcggcagccgtctcggcaagcccctctccgagctcgcggacgttccgcagggtgcggacgcgcgcgagccgctcgcccctccgacattcacccaaccgttgaacagcgccatcagccggtatgacgatgcgcaggtcgacgtcatcaggcgccggaacgcgaagcgcgaacgtcacgcgcgtgcgtgggcgcggtggtcacgcttcaaccgttgacggactgcggctgcaagctgtggcgcggcccgcggcatcgtctcatgcacgcaggcgaatatgagaatccgacggcgatggccgtctgtgacgaacggggtttcacgcatggtcaaacatcagcgcaaacattcggcggcggatcgacccggcccatcgccttcccagcggtatgccgcattccagaagcgtcaggcgcataacgcgagcgtcgccgcgcgtttcgcagccacgctgccgttcgacctggacgatttccagcaggacgcgatagacgcgttggagcggggtgagaacgtgctcgtcgcggccccgacgggtgccggcaagaccgtggtggccgacttcgcgatgtatctggcccgcgagcgcaatgtcaaggcgttctataccacgccgatcaaggcgttgagcaaccagaagtaccatgacctgaccgccgtttacggtgccgaccgcgtcgggctgctgacgggcgacatctcgatcaactccgaagccgacatcgtcgtcatgacgaccgaggtactgcgcaacatgctctacgagcattcgaccacgctcaacgcgctgcggttcgtcatactcgacgaggtccattacctcgccgaccggttccgcggcccggtctgggaggaggtcatcatccatcttccccggcaggtcagcgtcatcggattgtccgccacggtctccaatgtcgaggatttctcgtcctggatatcctccgtccgcggcgacactaagctggtggtctccgagcgccgtcccgtcccgctggagcagcatgtgctcgtgcaggccgacgaccacaccgagccggagctgctcgacctgtaccggcgtgacgcccagggcgagcagaccaccaagctcaacgcgcgcctgatcgaccggctcgatcagcttgaccgtcaggcggcgcgccgccgcggcgccgagaactcacgctcccgcggccgtggccattcgcggggccacgcgccggcgcagcgccacacgcccaagcgctgggcggtggtcgacgagctcaactatctcgacatgcttcccggcatctatttcatattctcgcgcaacggctgcgatcaggccgtcgagcagtgcatcaatgcggggctggaactcaccaccgaggacgagatgcggcgcatccgcgccatcgtcgacgagatggtcgccgggcagttgagccaggaggatctcaaggcgttgcagttctcccggttcaggttcgcgctggaggagggcttcgcgtcccatcatgccggcatggtcgcgctgttccggcagatagtcgaacgcctgtttgaagagggactggtgaagatggtcttcgcgacggagacgctcgcgctgggcatcaacatgcctgcgcgctgcgtcatcgtcgaaaagctggagaagttcaacggcagcgggcatgtgccgctgacaccgggggagttcacccagctgaccggccgcgccggccgtcgcggcatcgatacgatcggacacgcgatcgtcgtcgaccatcgcgatttcgtacctgcgaccgccgccgcattgtccagcaagcgcgtctacccgctgcattcgagcttccatgccacgttcaacatggccgtcaatctgctcaacaccagcgactacgagacgactcgcgccacgctggaccattccttcgcccagtgggaggccaacgagtcggcctggcagctcgaatcgcaactgaccacgctgaaacaggcgttggacggctataagcaggcattccactgcgagtacggggatttcgcgtctctgatgcgcatccgcatggagctgtctgacctggagaagaacggccggcgcaagctcaagcagaccgccttcccgaccgacgagcagcgcaagaacacgttccgcgagctggaccagtccatcgagaccctgaagaagcgcgaccgcgaacatccgtgccggcagtgccccgacatgcagcagcatatgaaatggggccatcgctggattcgcgagatgcgcgaatacgagcgggtgcagcacaggtacgagtcgcgcaccgggtccgtggcccggcagttcgaccgtatctgctccatcctggaacagctgggatacgtgaagcgcgacgggacggacatgcgattgagcgggcaggggcaactgctgcgccacatctacagcgagcaggacatcgtgcttgccgaagcgctggaacgcggcatgttcgaccatctgacggcgcgacagctcgccgcggtgctctccgccctggtgttcgaagccaggggaggcaccgggggagaaccgaggcgctggcccggcggcatccaaggcccggtcgcccagacttcgcaatctttggaccgtctgcatgcgcagctcacgatgctgtgcgaggatgaggggcttgacgacctgcagcaactcgacttcggcatcgtcgacatcatgtacgactgggccagcggcaacagtctggcatatgtgctgcatgaccgggacatgaccggcggtgatttcgtgcgcaacgcgaagcgtctgtccgacatcctccagcagatctcggcggcagagccgtatctgccgcaggggagcgcgcacctcgcccaggtcgcgcacgaggccatggaactggtcaaccgcggcatcgtcgcctattcgggcattggcgagggctgacggaatcgtcgcagacggcaaggcaggaccggaacggggaatatacgactcgtccgaactgttttgtagcgtgataatagttttcgggaaagatcgacaagaaagaccacaaggaggaacgtcatggcggaacgcagcctacgcggtatgagcatcggcgcgaaatcactggaatccgacgacaacgtggacttcgccgcacgcagcgaggtggcgtacatctgtcccaagggacaccggaccatcctgccgttcgccgagggcgccgaaatccccgacgagtgggaatgccgctgcggcaccatcgcgcaccgcgagggcgacggcgacgaggaggccaacgagatcgccaagcccaccaggacccactgggacatgctgctggagcgtcgcagcgaggacgagctgaagaagctgctggacaagcgtcttgaaatgcaccacagcggctggattcccgactacgagtaaggggagaggcatgtctcagcatcaggtcacgacccggcagcgcaggaacgtggtgctgctcgaccttgacggtacgttgacgcaatcggacccgggcatcatcgcctgcgccaccaaggcgttcgaggagctcagcctgccggttcccgacgatcaggagatgcaccggttcatcggaccggccatcatcgaatcgttcagacgcaaccatatgccggacgagctgctggaccgcggcgtggagatataccgcgaatactatgcggacaaggcggtgttcgacgacccgaacaatcccggccacaaaattcccggacgactgtacaacagcgtgtacgccggtattcccgagcagctggcggcattgcgcgcagacggcttgcacctggcaatcgccacgtgcaagccgcaatatcaggccgagccagtgtgcgagcatttccatctcgataccatggtcgacggcatctacggcgccagcacagacaattcgcgcatcaacaaggaccaggtcatccgatactgcttcgacagcatcggattcgatgcggatgccggtgaccgcgccctgatggtcggcgaccgttggaccgacgtcgacggcgccatcgcatgcgggctcgattgcctgggttgccgttgggggtacgctgaagccggtgagcttgaggaacatggcgcataccgcatcatcgataccgtcgatgagcttgcagccgcggtgaatgattatttcgcgaagtgaccatctgacataccgtactattatccgataattacgctgtgcgacagtgattcgaccgggcttcaggaatggctttatttcaacggtttgaagccatgttaatcagcggtttggaccgaagcctgccaaaggtagccaaacccgtatatgacaattggctatggggatgaagcgacccacggcctcggtgtgcattgcccttgccgtgggccggtttcatcatgccggcatccatctgcggacgagcctcgatgcgtcgcggtaggccaccgtgccgcgctccgacctccagaagccctgccattccggcgtctcgcggctcctgttgaagtcgaagcggccctccctcagaagggccatgagatcgggttcgacgggttcgccggtcacagggtcgttgacgaccagactcaggttggcagcgttgcgcctcacggcggagattcgccatgacttcggcagaccgccgggttcgaacgtcacgaggcgatcgtccggcaccacgcgccaagtgtccgtcaggacgttgcgcgggtcgcggtcgggcaggtcgggcgtcgggcgcacgtcgtcggggtcgattctcccgaatggctcctcgaccttccggctcccgcccgacagcaggtcgtccggcgaggcgtccgtccccgtcagccagttccacgggcgttccggcccgctccgccccatccacagtctgccgcccccgtcgcgccacagcgcgatggtctccagctccttcgacatatgcttgccaacctttcggcgttgttttcctatccgtccaaggcatggcgcggaaagcggccggacagccaagggcatgactggttacgcggtggagttccatatcccgacggagcatttcatgtcctcactgaccaaggtgtcctccacgacgagggcgaggcacagggcttggatacgcaggtacgcgcgtggcgtctggcgggccgcaatcgaagcgggcgcatacagaacggagcgcttcgtcgccttggcgatggtgcagtggccggggccctcgatctacccggcgatgtcctgcgcggagacgctgaagtcagaggaaccgggagaattgaagggtgcggagaggaaataggttcgaccgagccgtttcttcctccgggatgcaagcgcgaacaacggtttgttgtacccgcgcttggcgaacgggccatgcccttagaatggaatcagcaagcgcacagcgaggcgctcgaatcgttttccgatgtcgggaggtagtcatgtcgatcggtcaggttatcaaagtcgtgcgcgaggagcgaggccttacgcagtcgcagttcgcgcacgagctgttcgtcacccaacaggcgctttcccgctgggagaagggaacggcagagccgagcatcgacatgattcggcttatcagcacccgttttgaggtgccgatggcgaggcttatggagatgccggacaacggtttttgccaaagttgcgccatgccgttctatcgcccggaagaccatggcaccgaaccggatggaacgcgaagcggagattattgcaactactgctatgacgacggcgtttttcttcaggactatgccaatagcgatgaattggtcgccgcgtgtgcgccgatgatggcggaatcctgccatatcagcgtcgaacaggccgaggattgcatgtcggcgctgctgccaaacctcaagcggtggcggcatcaggacgagatcgatgcggtggcggaaggggaatgagcgatggcgttcgattataagaaggagtataaggacctgtatcagccgaagaccatgccggccatcgtcatggtaccggcgatgcggttcgtcgcggtggacggtgtgggcgacccgaacgaagaaggcggcgattacgccaaggcgatgcaactgctttacggcatttcgttcaccgtcaaaatgagcaagaagtcaaagaacccggccgagcatatcgacgggtacttcgactacaccgtgcctccgctggagggcttatggagcatgggggagggtgtgcccggcatcgattacgcgcacaaagccgacttccattggacttcgatgattcgtctgccggaattcgtgaccgataaggtctttgcgtgggccaaggcatcgtttgccgccaaacacccggaatccgacgtcaatcgcgcatatctcttcgatttcgatgaaggcgtggtcgcgcaggtcatgcacaagggcccgtacgacgacgagcccgcaaccgtggcgattctggatgactacgcgcgctcgcaaggctacgagctcgacctctccgacgcccgccgacatcacgaaatctacatatccgatccgcgccgagcagaaccggaaaacctcaaaaccgtcatccgtcatccggtagtgaaggtgggttgactttcagcgaactgctcgaagcgctcaccgggcggaccatcttggccgggttcctccgttgcgcacgtatgcgtccagcttcatcctgagcctcgcgttcgccaccgccttggtcttgccttgggccgtgagccgccgcctgcgcccggtggccctgtcgggctctatgtctatcgcggcgtgccagattccatcggcgcttttgtatgtcgagccgccgccacccattgccatcattggtctcccgtcgtgtgaaatgcgtagccaaatgcgtagccacaacgggccacccagaggcatccatagttacctgtgcgaaatgaagaccgttgaaattaagccgtttctaagattcccgaatagttagccgataatgtacgttatgtcagatttatgatcttcggggcagttgacgttccgcttttgcacttttatccggcgaaaatcctatttttcaagacgtgattatgggactttcgccggataaagatatcttcgtgcagattttggctgtgtttttcaggtaggtggcgatgaggatgagccggaggtcggcgaggaaggcctcgtcgagcctgtcgtactcgtgcgcgcggtccatgagcaggcgcgcgcccatgaacgcgttcgatgacttctcatgcatcatcaccagcaagcagacggtcaacatgccggtcgtagaggtcaagttcggcaacgacgacaacgaggtgcagggagacactttgttgggggaactgcccatcacgttccaaaccgacagctcgggatcatggaacatcgaattggacgcgacgaaactgacgtcggatgctcttccccctgtgggaagcgtcgattacgtcaacgatatattctcgtctcacagacgcatgcgtcacgcctcggtatgcgtggcgccgcggaccacgcggtcgacttcggtgaaatgcgcgcgatgcgcctggatacccatcagcaacagctccacaaaaaccagcacgatgactatcgccgcgccgatcaccaagtggtcggtgtagaaatcgtggaatgcgggggacagttcctcgctcgccatgagatacaccatgaaggggatgcccgcgaacagcacggacaccatctgggccagcaccacgttccagctgacggggttcacctcgggatgcctctcccccgtgccgaaccggcttctcacaatgcagatgccgcacaccgagagcatccacacgacggcgaacacccacaacaacagcggaagcagatcatccatacgccagcctccggttatgccgcctcgcgtgcggcacgctgggcggcaatcttcctgcgcatgcgcatggcggtaagctcgtcgattggccgaccggcgacacgtcccgaccctgcggagccgacgttcgccgaggacgactgcagatcgacgtagtcctcggtctccagcgcgtcatgaatctgatgccacagcgagccgacggacacgccgaacacggccttgccgctctgcagcagcgcgatcatctggtcgctggtggtgcattcatgcacatcttccccatcgcacatgatggtgacatgctcaagctggtcgacatcgcgctgcatcaggaacccgatggccgtagtgacgttctgcaggttcacgcctgcatccagcagcttcttggacaccgcgagaatcaccacgtccttgaaggagtacagtcgcctcgaccccgatccgtgagatggtgtgatcgatggttcgacgatctgcttgcgcgcccaatagtccagctgacggtacgtgatgccggcgaccttggaagccaccgtaccacggtagccccgtgtcgggcggcgggcgccttcgtcgacgaacagctccccctgcacggcgtcggacgcaccgagatcgagcctctgctccagcggcacgaccagatgcagcccggccgtctggctccctgtctgctcagccatcgcactcccccgtcctgtgcatgcgccgaaccggcacatgcacgatcacatgaatgacgtaccgtcccagtctaacgcgcacggcttcgcatcatcacgcgataacggcggatttggtgaagaaaaccagacggaacttaccgatcatgatctcgtcgccgttgcgcagctgctgatggtccacccgctggcggttcacataggtgccgttgaggctgccggaatcgtataccacgaatgtgtcgccgacgcggcggaacacggcatgggaacgggataccgtcgaatcgtccagcaggatgtcggcgcgggagtcgcgcccgaccgtcacctcgtcctcatcgagcaggtagcgggacccggaaacggcgcctctggtcgagatgagcagtgcggtgcccggtgcgagccgcgcgatggtttcgatgtcctcctgcgtgaggggacggtcacctgtggtggtgatgggaatctggatggcgggcagaccaatgatggtcgtctcgcctgcacttggaatcggatctgtcataaacgctattctacagcccttgcatacgtattgtcggttgacttgcgaatttggctgatggtaatcgaatccgaggacgtcacgctcaccgtcgcgccgtacttcaccttcagactcgaacccacgccacccgcgatattgacggcgttctgaaggttctggggatcgccgatggccaggatccgatacggcgcgcgcagcgcgacaccgtcgcattccagtccgtcgtccgtgtcgctgacataggttttcgtcacgacacgcacgctgttgatggccatcacctcggcgcctgcgttgcgcagttcctcgatgagtttgtacatcgtcgccgcgtcgatcttcgtcttcgacccttgggagatgctgatcgacacgcccttgcccgtcgcgggcaaacgaccggcgaggatgccgttggtctcctcgttctgcttggcgatgcgctccgcctcctgcgtcttgttcgccgcggccttgagcgattccagctgattggtcagctccgacttgcgctgctccaggttctgcacctgtgtgccggtctcgctgatcagcctggtcagctcgtcctcgctcagcgtctcgtatgtggcgtcggcgttgttgatctggatcatgtacccgtatcccagcaacgcgcacatgatgaggatgagcacgctcgtcatcagacgcatgcgcgccgagccgtccttgacggggcgcttcggcttcttgcgcactacggggaacgagccggtctccatgcgatcgttcttcttgtcctgcgcatgctgctcgtgcagctgcgacagcacgtcacgagacgatttgtgcgccaccatggttcatcacccccggaagatgaagcgacggattgccgacacgttcgagaagatacggattcccagcacgacgatgacggccgtctgcagctgggatccgacgcccagctgattgcccaggaacaccagcagcgtcgcggtgaccacgttcgagatgaacgagatgacgaacaccttgtcggagaagctgcgctcgaagtacgcgcgggccgctcccagtagcgcgtcaagcgcggcgaccaccatgatgggaagatacggctgcagaatgatggggatatccggcttgacgaacacgccgagcaccacgccgatgatgagacctagtaccgctgccatctactcgctcctctttgcataggacaattcgccggaaggtgccgcttccagtgtaatcgaactctctttattcacctgagggtatatgcccgcctgggcgaacgaatcatacagactgcgctgcgtggacttgctgaccgcggaggccagcgtgtcgcggtcccctatcgcctggatcgtgtacgggctggtcacggcggtgacgccgacgagaatgttcgatcccgccttgcgcaccgatgtctgcacgccgagccggttgccgttgatggctatgccctcggcgcccgcctgccacagcagtcgcaccagcagccgcaggtcggcgtcggtgatcacgcgaatctgcatgccgctggactcgcgtggcgtcgatgccccgtcggagccggcggcgatggggtcggccagggtcaggctgatgcccggcccctccacggcgacaagcccgttgaccatctcgtcgttgaccagcgtcgaatcctcacccgtgccgcccagcttcttcgatcgttccgtgacctggttgcgcagatcgttgacttcgttcatgagcgtgtcggcctggccgcgcgtctcgcgcagctcgctggcgaggctttgcctgacgaccttgcgcgggtcggaatgcagccgttcgatgaacagcgacccgtagaaaccgacggcgatgcacatggcgaacaccagaaacttcgtcgcccacgtcgacagacgcgagcgcggacgctggtcgagcctcgaatccgagaacagcggatccatggggcggttggtgagatcgtcgatgagcttgagcgaatcgtcatgcagccgtctgcggcgggccggcatggtctgcccgccttccgcgggcctgacatgccgggactgcgactgggccacggaatccgaaaacaccgcgcgacgtttcaccggcgcgttctcggccggcacgggaaacgacagcggcttgatcggatcagcgtccatcggcacgtttctctttcaccagcagtgaaatgccctgcttgctgtagatgcaaccggcgagccagtacagtccgacgccccagatgccggcggccagcgcggcgaggtgcagaagcccgacgaaggggttctcccagatgtcgcagaaaatcagcgcgacgatggagaccatcagcatgaaagtgccggccttgccgacgaaatgcaccggcagcgggccgtaatcgtattgagcaagccacagcacgagcagcatcatccatgcgtccctggccgcgatgatgatgatcatccaccaggggatgatcccggcgacgcccaatgcgaggacgctgcagatgatcagcaggcggtcggcgatgggatcgaggatctgcccgatcttgctcacctgattgaaggcgcgcgcgatgatgccgtcgaggctgtcggtgatggccgaaacggcgaggacgatcagtgcgggcaccatccggtgatcggcgaccagccatgcgataaaggggatggacgcgattctcaggacgctgatgaggttcggcacggtgaagtagatgtccctcggctcggggctgtactcctggttgaacttctgcttgatcttctggcggtatccgccgtcggcgtgctgctgtgtacccattgtcgaaccccgttcgtcacatgcgggaggcctgcagcgcggtcacgatgatggcccgggcacccacctcgtacagcttgtccatcagctggttgaccttcgccttgggcaccatcacgcgcaccgcattccactgcttgtcgtgcagcggggatacggtcgggctctcgaatccgggggtcaccgcgacggcggccgccaccttgccgacggggatgtcatagtccatcagcacgtagcgctgcgcggtcagcacgccctgcaggcggcggctgaggatggtgagccgctcgtcctcggggtcgaggcgcggggagcggatgagcaccgcttcggagtgcatgatggggtcggcgaagatgcgcaggccggcgttgcgcagcgtggtgccggtggacaccacgtcggcgatgaggtcggccacgcccagctgcaccgaggactccacggcgccgtcgaggtggatggtctcggcctcgatgccgtgcgccaccagatagtcgtgcacgagcttgtcgaaggacgtgcccacacgcttgccctggatgtcctgcagcgtatggaagtcggaatcgttcggcgcggcgaagcggaacgtggacgcaccgaagccgagctccatgtgctcgctggcctcggtgccggagttcagcagcaggtcatggcccgtgatgccgacgtcgatggtgccgcggccgacatacacggcgatgtcgagcggccgcagatagaacagctcgatgtcgttgtccgggtcctccaccacgagctgacgcggattggaacgcagacgataccctgcctcggacagcatgttccaagcgggctccgacaacatgcccttgttgggcactgcgattctgagcatggtgtttctccctccagaccggccggtctgtttgtcacaggtgcttataaacgtcctccagggtgatgcccttggcgatcatcatgacctggagatggtacagcagctggctcatctcttcggccgtgcggtccgcgccctcgtattcggccgcaatccaggtctcccccgcctcttcgatgatcttcttgccgatgaagtgcgtgcccttggcgagctcgtccacggtcagggagccttcgggcttggtgacggccttctcggacagttcggcgaatagcgattcaaacgtcttcatgatatgtgtcccttgagattgtgcatggttgaggcactcgacggcgtcgccgcgatcgcggtccggcattggtgtcggagccgtcgcgtgccatgttctgcgtttccgccgtcagtcgcggtatgcggcagcggccttgtccctgatctggtcgatggcctgggccgggctctcagcgccgtacacggcggagccggcgaccagcacgtcggcgccggcctcggcgacgatgtgggcggtcttcgggctgacgccgccgtcgacctgaatatgggtggacaggccccgacgcgtgatctcgtcacgcaggcgacgaaccttcgccatctggttgtccaggaacttctgtccgccgaaaccgggttcgacggtcatgatcagcaccatgtcgaactcgtcgaggatgtcgaaaatcggttcgaccggctcggcgggacgcacggcgaagcatgccttgcagcccatgtcacgcagctggcgggccagacgcaccggcgcgtgggtggcgcccatatggaacgagatggaggcggcaccgagcttcgcgtattcgggggcccaacggtcggggtcctcgatcatcaggtgcacgtcgaccggcaggtcggtgacctcgcagatgcgcttgacgatgggctcgccaagggtgaggttcggcacgaagtggtggtccatcacgtcgacatgcacgaggtcggcgttggcgatggccttgaggtcgcgttcgaggttgcagaaatcagcggaaaggatgctgggtgcgatttgtatgctcatggctctcattctatggtggaagaacgacgagacggcttgcgcctacacgacgttcttgtttgtgtgttatggtattgcggttttctatgatcttgtgcgatatcctgattcggacggatgcgggcgctcagtcctgatggatctcgctctcggcggtttcggcgggagtctcgggcttcgcggtcttggccatcttgccggatttcgcggcggcccgctcttccagctggcgctgacgttccatctcgtcggccgtgaccgcgcgcagtctggatgtcaggtcgcgtgtctcactgccgaagcgccacaacacgacgaacaggatgcacccggcaaggaacacgatgatcgcggtccacacgttgactcgcaggccgaggatgatcgtcgaatagttgatgcggatgctttcgatccaggtgcgtccaagcccgtaccacatcatgtacatggcgaactgctgtccggatttgagcacgtcgacgagtttgtggccgagccacacgataatcgcggcgccgatcaggttccagatcatctcgtacaggaacgtggggtggaacagcgtgccggtcgggcatgcctgtccgttgtagcagatctcacttttgccgatggcgtccgcatcgttgagcttgaggccccatggcagcgtggtcggcatgccgtacagttcctggttgaaccagttacccagtcgtccgatggcctgcgctaccatcagcgccggcgcgatgcaatcggccagcagggcgaacggataacgccggtggcggcaccacaggaacgcggccaaggcccccaccccgatgccgccgaagatggccatgccgccttcccacaccttgaggatgttgatgaggttgccggttggcgggaagtagatgtcgggcgtcgtgatgcagtggtacagacgggccccgaccaggccgcagggcactgcgaccagcgtggtgtccagcacctggtcgaaggtgcccccgttcttcttccatctgacggtgaggatccacacggcgaagatgattcccgtcaggatgcagatcgcatacatgtggatcgtcaccggtccgatggagaacttggagaaccccggtgaggggatatacgcaagattcatgcagtgcctcgtttgtctagaccgctgttaccgccatctaccctaccccatggccggcggatgcacggtaaaggcagcccgccggcgcgggggtgtgtcagcgtgactcgttgtggatgccctcggacagcgcctcgaccttggcggccaggtcgcgcagtccttccttcggcgccttcgcggtgacgttgtcgtcgtcaagcagggtgtgcaccagagcagaaccgacgatgacgccgtcggcgtaggcgccgaccttcgcgccctgctccggggtggatacgccgatacccacgcacacgtttctcgccccggcgttgcgggcacgctcgacaagcgtttcgggcgatgcgctgatagtgtcgcgctcgccggtgacgcccatacgggatgccgcgtagacgaagccgcgtgcgttgcgggcgaccagttcgagacgttcggaggccgaatccggggagaccaggaagatgcggtcgagtccgtgacgatccgaagcctcgatccactcgccagcctcatcggggatgaggtcgggggtaatcaggccggcaccgccggcgttctcgaaatcgcaggcgaaccgttcgacgccgtaatggtagatcaggttccagtagctcatgatgagtggcacgccgccggcgttggccaccgtctcgaccgccttgaacacgccgttgatgctttccccgttgttcagggcgatctggctggccgcctgaatgacggggccgtccatcaccgggtcggagtacggcaggccgatctcgaccgcgtcgacgccgtgctcgatcatggtcctgagcgcgtcgagtgagatgtcggggttcgggaagccatacggcaggtatccgatgaaggccggcttgttttcggccttgagccggtcgaacatggcttccgtcgcgctgggcttgtgactgatgccgagcggctgtccggacggcgtggttgctgtattcgtcatgatcaaaaactccttctgcttcacgggccggttcaggcgacggtgtcgccctgcgcgccggtgacatcgagcgccgcggcctgctcgtcggtcaggtatccgaaccatttgcccgcggtggccatgtccttgtcgccgcggccggagatgttgacgatcatcacggccttgtcgtatcccttggccttcagatcagcggcggccttgaaggcgccagcgacggcatgcgagctctcgatggcggggatgatgccctcggtctggctcaggtcgcggaaggcgttcatagcctcctcgtcggtggcccaggagtagttcacgcgcccgatctccttgagccaagcgtgctcggggccgacggaagcgtaatcgagaccggccgaaatcgaatacgtgtcgagagtctgtccttcatcggtctccaacaggtagctcttggcaccctggaacatgccgagctgtccggtgcccggtgcgaaacggatcgcatgatggcccgaggccggcccgttgccgcccgcctcatagccgtacaggttcacgcgctcgtcgtcgaggaacgcgttcatcacgccgatggcgttggatccgccgccgacgcacgcgcacaccgcgtccgggtggtcgatgccgtaccagtcctgaagttgctgcttggcctcctcgccgatgatcttctggaagtcgcgaaccatggccgggaacgggtgcggtccggcgaccgtgccgagcaggtagtgcgtgtcggcgacgttggtcacccaatcgcgcagcgcctcgttgattgcatccttgagaatcttgtcgcccagtgtcacttcgacgacctcggcgcccagcatgcgcatgcgggccacgttgagggcctgacgtcgggcgtcgatctgtcccatgtacacacggcacttgagccctagcatcgcgcacacggtggcggtggccacgccgtgctgtccggcaccggtctcggcgatcacgcgggtcttgcccatgcgcttgacgagcaacgcctggccgagcgcgttgttgatcttgtgcgcgccggtgtggttgaggtcctcgcgcttcaagaagatgcgggcgtcgagtccggtcctgtccttgaccagcgcggcgaatcgcggggcttccgtcagcgggctcgggcggccgacgtaccgctgctgcagcgtcatgaattccttacggaactcggggtcggccttggcctgatcatagatgcgctccagctcgtccagagcggtgatcagtgcctccggcacgtatcgcccgccgaactgtccccaatatggtccctgatgctcgctcaacggggtcgattcggatgctttcactctctgacctgcctttactagtcgttgtacggcggccacatggtcgtcggcggtggccacgccttcgcccaccagcacggcatccgcgccggcgcgaccgtaatcctcgacctcgaccgaaccgaacacgcccgactctgcgacgcggatcacgtcatcgggcagtccttcggcgagttcggcgtatttgttcacgtcaaccttcaggttcttgagattgcgcgcgttgatgccgatgatccgggcaccggccgcgaccgcgcggcggatctcctcggtggtgtgcgtttcgacgagcacggccatgccgagctcgtgggcgagttcaagcaggtgcgcgagcttgtcgtcgtccagcgcggcgacgatgagcagcactaggtcggcgccgtgggcacgcgcctcgtagatctggtagtcggtgacgatgaagtccttgcgcagcagcggaatgtgaaccgccgagcggaccttgtcgaaatcgtccagcgagccgaggaaccgccggccttcagtgagcacggaaatcgcgctcgcaccgccgcgctcgtattcgcgggccagggccgccgggtcggggatatcgctcaaatgccccttggatggggaggcgcgcttgatttcggcgatcacggggatgccgtccggacgcttgagccatcgcgtcgcgtcgataggcgccggcgcggccagagcggcccgcctcacatcctcaagagacacgacacattcgcgggaacgctggtcttccaacgccccggcaaccaattcgtccaaaaccgacataatgctcccttatagatcgttcggtcagtcgccactgtaattcatggcagacgacaaccgcgcgttccgtcctacattctgggcgtggccgcgggccggagcgggccgggatcgtggcccggcaacgaaggcggccgccgcggaggaatccgcgacggccgcgcatgcacgctcatccgtgcagggagagaccccgcgtcacttgcggcgcttcttctccctgatgttgacggagatctggatcggagtgccttcgaagccgaactcctcgcgcagggagcgctcaaggaaccggcggtagccgtgctccaggaatccggtggcgaagatcacgaagcgcggcggacgcgtggacgcctgcgtggcgaacaggatacgtggctgcttgcctccgcgcagcggatgcgggtgcgcggcctgaatctgaccgaggaaggcgttgagacgcccggtgggaatgcgcttgtcccaggattccagtgcgttgcgcatcgcgtcggcgaggcggttcgtgtgccatccggtcttcgcggacaggttgacgcgttgcgcccacgtcacgcggttgaactcggtcttccacaggcgctccagccgctgccggccgaaatcgtccatcaggtcccacttgttgaacaccagcaccactgcgcggccggcgtcgaccgcctggctcatcaccttcagatcctggtcggagatgggctgggacgagtcgaacaggaccagcgcaagctcggagcgctcgattgcggcctgcgtgcgcagggacgagtagtagtcggcgccggacaccttgtgcagtcgacgcttgatgccggcggtgtcgataaacagccagtcctcgccgtcgatgtcgatggtctcgtcgaccgggtcgcgggtcgtgccggcgaggtcgttgaccacggcgcgctgttcgccggcgagctggttgagcagcgacgacttgcccacgttcgggcggccgacgagcgcgacacgccgcagatgcgtaggcgtgaggaagcccgaggtcttgtccgccttgcgcagcgaatccagcgcggcgtcaagcaggtcgccgactcccctgccatgcatggccgagatcccgtaaggctcgcccatgccaagcttccagaactcggcggtcaggtattcgctggccccgtcgtcgaccttgttcaccgcgagcgtgaccggcttgccgctggcccgcagcatcttgacgatgcgctcgtcggtgtccgtcagccccacgtggccgtccacgacgaagatgaccgcgtcagacagctgcacggcgatctgcgcctgcgaggcgatggcggattcgatgccttcgacgtcggcctcccagccgccggtgtcgacgagcttgaattcggtgccggaccattccgcgtcgtagctgacacggtcccgggtcactccgggcgtgtcttcgacgaccgcggcgcgacggccgaggatgcggttgacgagcgtcgacttgcccacgttcgggcggccgaccacggcgagcactccgacggccttgggagccggcgactcgtcttcgatcccgtaccgggaaccggcgatgatctgctcgtcgccctcatccagttcgtaatcgctcagattggcggcatactgctcgtactcctgcacttcgaccgcgtccgcgaccagcgtgatcagcacatccagcgtctgctggaaatccatatcggagttgtcgacggtggtcacgccgtctgccgcggtcaggaagctggtgaccttggaatcggcgcggtcgcgggcggccacgtcctcgccccccacgccggcgccggcgacggcctgccccgtgcggcgcgcctgacgcacctcttcccgggcggtcagcagcacacgcacctcggcatcgggagccacgaccgtggtgatgtcacggccctccgcgacgatgccgcggcccagcgagaaggagtcggccgcggactcgcgcgcaatgtaggcgcgctgcgcggcgatgagcacgtggcgcaccgggatgacgttcgacaccttcgacacgtgcgaggagacctcggaggagcggatggcctcactgatgtcctcgccgtcggcggtgatgctcggatggtccgggtcgacgccgatgtcgaagtggtcgccggtgaagaattcggcgactgcttcggtgatctgctgctcatccacctgatcgccgtcgaggtcgatgccctgatgcaggcaccaccaggcgcatgcgcggtacatggcgccggtatcgaggtaggcgaagccgaaatggcgggccagcgccttcgaagtggaggactttccgacgcccgcagggccgtcgatggcgactcgtatcacagcccgacctccttctgcagggaacgaacctcgacctgggacagcacacgataggtgccggacttgaggtcaccgagcttgatcggcccgatctgggtgcgcaccagacggcgaaccgggtatccgatggcgccgaagatgcggcggacgatacggttcttgccggagtggagcaccaccttgacgatggtctggtcgcggttggcgtcgatgatggcgcaatggtccagcttgaccaggccgtcatccagctggacgccctgggtcaccaggcgccggcagacgttgccgccgatcttgccatcaatcgtggcgatgtaggtcttctccacctcgtacttcgggtgcatgacgtgctggctcagctcgccgtcgttggtcatgaggatcaggccctcggaatcgtagtcgaggcggcccatgtggaacacgcgctcgtacttgtccccgatgatgtcggccagcgtgtagcggcctttcgggtcgtccatggcgctgagcaccttcttgggcttgttgagcgccaacgtgacatggttcgggttgaggtggacgcgcgagccgtccacacggatgtgctgcttcttcggatcgacgcgggtgccgagttcggtcaccagctccccgtcgacctcgacacgcccatcggtgatcatctgctcgcacttgcggcgtgatccgaagcccgcttgcgcgaggatcttctgcaggcggattccttcgttgttgttgtcgtcatgcgctttgagtgcgcgcgaatatacgtttggcatcgttctcccaacgtggccggacattgacaatgaatctgcgctcccggacaaactcacagggaaaacacagccaatacattgtatcgtatcgtccccccgttggtaaacttgcaacgttcggcgggtcgcaaagcccgcaacatcagaaaaaggacactacaacatcatgactgaagaacagaacaccgagccaagcgcttatccgatcggggcgcgcgtgtgcgcggagcttgcaggcagcttcctcgtctgcttcgccatctatatgatctgcacgttcggcacttcgatctacgggcttgacctggcgtacatcgtcgtgggcaccgcgttggcgtacgcggtcgtcaccgcgatgctcgggcgtgtctccggaggccagttcaatcccgccatcaccgtggcggcgatactcaccggcaagaccaaggtagtcgccggcatcctgtacgtcatcgtgcaggtggtcggagcgatcgcggcggccggcgcggtcaggtggatcctgccgacctcgcagaccgtcaccatgaagacgtggctgacgcccgccgtcaacggctatggcaccggttccgtatcgagcgccaccaccagcagcgtatcggtgagcttcggcatctccatggccatcgtcgtcgaggtgatcgccgcgatcatcatcatcgcggtcgcgatgcgtcacaccgatgcgaacggcaagccgaatgcgacgtacgctccggtgatcggcgccgcatacggcctcggcgtggccatgacctatacggtcaccggtgccgcgctgaacccggcccgcgccaccggcatcgcgctgttcgggcagaatcagggtctttcaacgcagccgctgcagcagttgtggatcttctggctggcgccggtcctggccgcggcgatcgtggcgctggtcatgatcatcgctgatatggcgtcgaaacgcaagccgaagacgcctgcggatgcgcccatcgacgaggcggcggacgctgaggcggatgcacatgacatcgccgtggacgcggcggtcaatgcggcgccccaggttccgtcaacgaatccagaacagtgacggtgcgaaatacaacagaagcagtcccagccccaaaccgatgccgataatggcgtcgaacaggactgaccggactttccaagggctcttctcgcgcatgatgatgcgcagcagggccgtgacgatggccgtgacggcgatgatcaccgtcgcggccatcgtatatccgaggaaggcgacgaccagggcgacgatgacgacgccgagcacgcaccactcgaatgccggcttgccctcgtggacttcggacacgtatggatgatgctgattcatggagcttcctcggggattggttatcgtgatggatcggccgcgaacccttgacggtcggcggccgatccgtgaatcggtgaccgggcggaggatcagtggaagaaatgacgggtgccggtcaggtacatcgtcacaccggccttcttggccgcctcgatgacctcctcgtcacggatggatccgccgggctgcacgatggcctttacaccggcgttcatcagcgtctcggcaccatctgcgaacgggaagaacgcgtcggacgcggcgaccgaaccggtggcgcgatcggcgccgtcggccagcgtgttggcgcgatcgacggccagatggcaggagtccacgcggttgacctggcccataccgatgccgaccgtagcctgatcgtgcgcgagcaggatggcgttggacttgacgcagcggatggcgcgccaggcgaacacgaggtccttgagcgtggcctcatcggcgggttcgccggccacgagcttccatgcgtccggatcgtcgccggtggcattgatgaggtccatgtcctgcacgagcaggccgccgtcgatctggcggaactgcgtgtggcccttcggcggctcggccaccttgaggatgcgcaggttcttcttcttggtcttgagcagttcaagcgccgcgtcctcgtaggcgggggcgacgatgacctcggtgaagatcgggcgaacgctttcggccatctccaacgtgacggtggtgttgcaggcgatgacgccgccgtaggcgctcaccggatcgcaggcgtgggccttcttgtgggcctcggctgcggtggctccgatggcgaggccgcacgggttgttgtgcttgaccacggccacggcgatggcgggtgccatatcccacacggcacgccatgcggcgtcggcgtccacgtagttgttgtagctcatcggcttgccgccgagctgttcggcgtgcgcgaagccgtcgcggtcgagcgggtcgaggtagagggcggcctgctggtgggagttctcgccgtagcgcagcgtgtgcgcgcggtcccaggtgcgggtgaacgcggccgggaacttcgcctcgttgaccgggttctcgccttcggccgggtcggcggattcgacggtggcgggcttgggccagtgcttggcggtccactcgttgatggtagcgtcataggcggcggtgtgggcgaacgccttgccggccagccagcggcgctcctccagactgaagccttcaccattggccacacgggccgcgacgagcgcatagtcggccgggtcggtgacgatggcgacggtggcgctgttcttcgccgcgccacgcaccatggacgggccgccgatgtcgatcttctcgatgaccgcggcctcgtcggcgccggaacgaaccgtatcggcgaacgggtacaagttgacgacgaccaggtcgaagggcttgatgccgaacttctcaagctgggcagcgtgatcggggttggtcatgtcggcgaggatgccggcgtggatgtgcgggtcgagcgtcttgacacggccgtcgaggcactccgggaatccggtgacctcgctcacctcagtgacggcgacgccgagttcggcgaggcgcttggcggtcgagccggtggacaccacttcggtgccggccttgatgaaggcctcagccagtacttcgatgccttccttatggaagacggacaccagagcccgtcgtatcggtcgattcgtgttggtcatcgtgctccttcttggttgttgattgtatggacttgcgggaaacgatggtacgcgggtgcgttgttgcggctcgttgtgcccccgttcttcgtgcaatccagcgtatcccgaaaacaatggcgacgccaatcagcgccagcacccaggccatgcacagtcccatggcgctcggacgtccgacggcctgcgcggactgcatcacgtcgacgccgacgtatttgagcctggcctttcccagcgacccgttcgacaccccgaacatgaccgacgacagcagagatatgaccacgctcgacaggcagaacccgcccgccgggtaggcgagttcgagaatcaggtccttgcggtcgaggggatcggacgcgctgccgacgatgatgcggaaaccggatttcatcgccatggatgccagcccggcgacgaatccgacgaccagcggaatcagcacgacggcgaaccgtatgccttcatcgccgactgcctgcggaagcaggccgaaaacaggaagaggcggaagcgaacgcccctgcccgatccaaagggtgaatgtcgcaagctctccgatgtggaatccggcaccgaacagccacgagaccgcccatatgcacaggttgggcagccatgcaagcgatgcgatcgtcgtcagtatgcgcgagccggtccccatgccgatgtcggcgaacagcgagtccatggccgaacggttcagcacgccccacacgatgacggtgatcagtcccatgaccaggtacacgcccatcatgatgacacccaccatcaggccggtcctgatcgtgcggcgcacgccgtcggacacatgatgacggataagttcacgcagctgcccagagaacgggcccttcgacagcgcggcgccggcgaatccaagcgagaacaccacggccgatttgacgcataccagagccggccagtcaagcaatccgacgggaagtgactgcgtgcccatgacgttgatgaaaatccagaccaccacgccgctgacgtatgcgcggatatccgtgcatatcttccggctgaacgaccagaccagacctatcagcagcacggtgagcagcaacggcatgatggacagggaaagcgagtcggtctcgaatccgatgccctggctgagcaggaccacgatgcgggtcatgtccaacgtcgaggacgacaggttttccccaccttcctccatcgagatgaccagcagcatgagcgcaagaaagcagcccagggcgatggcgtacaacgccatcgagccgatggcgatgatcggccccctgagccaggcctggatacgcttcctcataccagcgagcgttcggcgagcaccttgcgcatgaggtccgcggtctgaccgggagtgcgtccgacgggaataccggcggcttccagcgcgattttcttgtcctgcgcggttcccttgcctccggagacgatggcgccggcatggcccatctgcttgccttccggcgcggtgaatccggcgatgtatgcgacgacgggcttggtcatgtgctctgcggcccatgccgcggcgtcctgctccgcgctgcctccgatttcgccgatcatgaccactgccttcgtgtcggcatcctgctcgaattcctgcaaggcctccagcagcgtggtgccgacgagggggtcgccgccgacgcccaggcaggcggtgaagccgatgtcgctcagctcgcccatcagctggtaggtcagtgtgccggacttggagaccagtccgatggggccacggcccacgatgccatcggggatgatgccgaggttgacgccatgctcgttctcctgcgacggcagggtgagcaggccggggcagttcggtccgatgatgcgcacgccacgctgaagggcgagttcgacgaagtaggcgctgtccgcaacgggaatgccttcggtgatgaccacgatgagcccgattccggcttcgacggcctcgaccacggcgcctttggcgaaccgtggcggcacgaagaccacactggcctgggcgcccgtcgcctccttggcttcggcgcacgtggcgtacaccggaacggagacgtccctgccctcacgcgcggcctcgaacgtcacttggctgcccgccttgcgcgggttgacgccgccgacgatgttcgtaccggcacggagcatgcgggcggtgtgtgtcatgccctgatgcccggtcatgccttggacgatgacgggagcaccctcctggatgaatgcggtcattgcttggcctccttcgatgccttggcgttcgccgccagacgggcggcctcggctgcggcctgctccatggtgccttccacatgcaggttggggttgttcgccgcggcgaggatttgcaggccctcggctgcggcattgccatcgaagcggaccacgagcggcttcgatgtgtgcagctcctcgaacgcctgcaggatgcccttggcgacctgctcgcatgaggtgatgccgccgtagacgttgatgaacacggattccacctgcgggtcggacagcacgatggacaggctgtcactcatcaccgcggcggacgcgccacctccgatgtcgaggaagttcgcaggcgtgacattcgtgccctgctccttgccggcgtcccagacggcgtcgagcgagctcatgaccaatccggcgccgttgccgatcacgccgacctgaccgtcgaggtgcacgtagtgcagcccgtgttcggctgccgccgcctcgaacggatcggcctgcatcggatcgtcgaagcgggcccacccgtcgtgccggaacgccgcattgccgtccaacgatatcttggcgtcgagggcgcacagtgatttggacgcctcatcgtcgggatcgccgatcttggcgagcgggttgatctccaccagcgtcgcgtcgttgtccttgaagcactgccacatgcgcagcaggatgttggcggcctgatccaggtcggcgtggtagaagccgatctggccagccatgcgcttggcggcctccatgtcgaaatcgccgagggcgttgatgtgcagacgcttgaccgattccggatgttccttggcgatctcctcgacttcggtgccgccgttcgcggtggcgaggacatcgaagtcccgcgatgtgcggtccacggatatcgacacgtagtactcgtgcaggatgttcttcgcctcggcgacgagcacaccattgaccttatggccgtggatggtcatcgggaggatggattcggacagcagtatcgcttcgtcccggttgtgggcgatcttgacgccgcccgcctggccgcgatggccgatcttgacctgagccttgatcacgcacgggtatccgatggcatcggccgcttcggcgacctcgtgggagttctgggcgaaaacggcccgcggcgtgggaatatgctgttcctccagcaattctcgtgcctggtattcataaagatccatgttcgacgcctcacgttcctatgatgtgttcttcgaatgatgattggtgccgtgcggcgcgtcccgacgcacggcaccgccgggtcacgccggcatcgacaccagtgtgctgctgggtttgtcgcccagtttgtccagtccgtcgagtcctcgcagccccatgacgaagctgaatccgacgaccgtgccccctgccgcctcgaccagatccatggccgccttcgccgttccaccggtcgcgatgagatcgtcgacgatcagcacccgatcgcccggacggacggccgacgtctcgatctccactttttcggtgccgtattcgagatcgtattcctcggcgatggtctccggcggcagcttgcccgccttgcggatcgcgatgaaccccttgccgagcatggccgcgagggcggggccgaacaggaaccctctggcctccagccctgccaccgcgtcgaacgagtcttcggtgacgggaaggctggcctggagcgccttcatgagaatgcgcagccccttgccatccgccagcaccggcatgaaatcacggaatttgataccctctttggggaatcccggtatggtgcgaatcttcgagacgaggtatgccgcgtcaccggcaccgacatcggccagtctctcaatggtgatgtcagactgcgtcatggtctcgcgctcccccgtcacttctcggcgtctgcggtctgcgcggaatcgtcggactgcgttgcgttctcggcggattccagcgccttgtccaccggtacctgggcctggtcgtcggcttcgtcggtctgctccgcgtcctccacttcgtcatcatggatgaaggcgggacgcgtgtactccttgttgatggcgcggaaggtgaagcgcagcagggagccctcggagtcgatgacgatctcctcgtattcctcgtccacggacactaccttgccgatgatgccgccaatggtgattacctcggttccgggctcaagggaggagcggaagtccttcatcttttgctgctgctgcttggccttgcgggactgccaccacatcatgatgccgatcagcacgatggaaacgatcatgatgagataggatgatgaaccttgcggcatgatttctccttgcagtagggaacgaatgctctatggacgtcggtcaacaaacaaccaatgttagaagagcttgctgacatcctctccgtttgtttcaccttgtggctccagacccagatgagaccaggccttggccgtggcgacccggcctttgggagtgcggatcagaaatccttcacggaccagatacggctcgcatacggtttcgacggtctccgattcctcgccgaccatcgcggccaggttgttcaggccgacgggccctccgttgaagttgcgcacgatcgcgttgagcacggcgatgtccagccggtcgaggccctcggagtctatctgatagagcgcaagcgcggcgcgcacgtcatcgacgtccacgacttgcaggtcatgcacgatcgcccagtcacgcacacggcgcaacagcctgttcgcgattcgtggcgtgcctcgagaacgcagggcgagttccgcggcagccccctcccccaatgagactcccagaacgccggaggatcgctcgatcagcttttcgagctcatcgtgggggtagaagtcgagatgggccgtgaagccgaaacgcgcacgcaacggagaaggcaacatgccctcccgggtggttgcgcccaccacggtgaatctgggcagcgtcaacgggatggacgaggcgcctggccccttgcccaccatgacgtcgacgcggaaatcctccatggcgatgtacaacagttcctccgcggcgcgcggaagacggtggatctcgtcgatgaacagcacttcccctgcgtccagcgagctgagtatcgaagccaggtcgcccgcgtgctggattgccggaccggacgtgatgcgaatcggcacctccagctcgttggctacgatcatcgccaacgtggtcttgcccaatccgggagggccggcgagcaggatgtggtcgggggcggtgtcacgtttgcgggcggcgtccaggaacagctgcagctgggccttgagccgcggctgcccgacgaatccgtcaagggcatgaggccgcagttcctcgtcgctgatcggctcgtcgttgattgcggtggcggagaccatgcgtagggagtcctccgagacgccggtgttggtccgtccatcctgcatgtcgatgttggatgtcatggaatatcaccttcctctgtccagcgacgacaatgccagtttgagcacccgcggcacgtcctccgcactgatgggggtggctatggacgcggcatcgcatgcctgacgtacggcctcctccgcggtctgggggcgccatcccagagagacgagtccttcgatcacctgcctggctccggggtcgcgactttccgacggcccatcggcttcgggccgtatctggtcgaggtcgatgcggcctgccagttcaaggatgatcttctgtgcgccttttttgcccaggcccggagccttggacaatgccgccgtgtcgccgtccgcgacggccttggccagacggtccggaggcagcgtcgacaacagggaaagcgcgaccttcggcccgatgccactgaccttctgcaattgcaggaacatgcgtttggacgcgggtgacaggaacccgaacagggtgacggcatcctgcgatatggtcagcgaagtgaagacgtgcgtttcctgaccggcatgcaacgccgcaagatcggccgccgccatgcggacctcgtacccgacgccatgaacctcgatcacggcgctggatgcctccaccgactcgacgcgcccggttaacgtactgatcatcacgtcgtcctttcctcgccgaaccgcacgcggaatgggccgccacgagctcgttcgcctcgcatcgcataacgaaagcacatgccgaacgcgcccgccccgaactggcacgtcgtgcgggatatggtgtcgagacggcccatccacataacgcagaacatctgttcgatacacattacatgccgctgcggacgccggcgcgtcgagcggccttctgcgccgcctgcgcccactgccgttgagccgcggtcagatgctgttcccgttcgcctccctgcaaggcgccttgcgggcgcagggcgtggcatatcgccagcgacagtgcgtcggcggcatcggcgggctgcggcaacgtgttcagccccagcaccttggccaccatgcgttcgatctgtatcttctcggccttgccgttgcccgtgatcgcgagcttcgcctcggtcggcgtgtgcagcgccacgggaatcccccgttgcgcggcggcgagcatggccattcctgcggcctgggcggtgcccagcacggtgttgcggttcgactgggcgaacacgcgctcgatcgacaccgcatcgggaatgaaccggtccattttggagcacagcccgttgtagatcgtcagcagtcggagatcctgcgacgtatggggatccgaacgcaccacatcgacgtggataaacgaaagccggcggttagcgccggcttcgatcacgccgaccccgcagcgtgtcagcccgggatcgacgccaaggatgatcacaggggattactcctcgtccgcgagctgggccatcacctcgtcggatgcggtccagttggcgtagatgttctgcacatcgtccaggtcatcgaggttgtcgatgagcttggagaccttctgggcgtcctcaaggctgagcgacacctcgttcttcgggcgcatgaccatatcggcggagtcgtagtcgaaaccagagtcctgcagagccttgcggattgtatgcagatcggagggatcggtgatcacggtgaacacgtcgccgtcgtcgatcacgtcttccgcaccggcgtcgccggccttctcgaacaggtcgtcgaagtcgacgccctcgctcggaacctcgatctggcccttacgctcgaagttgaagctgacggaaccgctggtggccagcgagccgttgcccttggtcagggtggaacggacttcggcggcggcgcggttgcggttgtcggtcaggcactcgatgatcaggccgacgccggcaggcgcatagccctcgtacacgatgtcctcgtagttggcgccaccggcttcttcaccagagccgcgcttgacggcgcgcttgatgttgtcggccggcatggacgccttcttggccttgtagatggcgtcgtacagcgacgggttgccatccgggtcgccgccgcccatacgggccgcgatctcgatgttcttgatgagcttggcgaagagcttgccgcgcttggcgtcaatggcggccttcttgtgcttggtagtcgcccacttggaatgccctgacataatgctcctacaggtatacggatactgacaaacgtcactatgataaagcggcaagacgacaacggcagtcctgggttctgccgctgccggtcattacgccgcaagaggaaccgcaggcaccgccgaaagtcccatctgatgacacagaaatgggactttcgcgggatgacggacgatgatggagctgcgcacgcctgccgggccggcaatacggcgaggcctccgccgtgaaatgtacggcggaggcctcgttcattggtcagaggttccgattcgaatcagcgacgctgacggcgaaccgcaagcatcacgatggcacctgccgcgcagatcatcgcggccagtgcggcgccagagacactggcaccggtctcggcgacgacatcaccgggctttccgccttcgggcttgatctggggcttgttgtcgccggacggcttctgcgggtccggattcggcttgggggtcggatcgggatcaggatcgaccgtgcccttgtcagtgacggtcatcgtgaacgaatccttgatcgaaccgtcatccttcagtgccacggtcacggtcaaatccccggcggcctcgaacggcttggtcacatcgattgcgttgccgtccttgtcggtcaccgcgatcgtgtaatccgcggctgcgagcacggcggtcgtcttgtcgctcttggtggcgaccaccttcaccttcgacggatcgaacgtatcaccgaccttcacgtcggactgcgaggtcgaagcctttatggagacgaccgtcacctccggttcgggatccggatcaggcgtcggacgctcgtcgccggtccaagtctgagtcaccttaccgtccttgatagcgatgctcatcgaggaatccgaagggatcgggtaggtggaggaggacacggagacgtcgagacggcctacggcctcgctgtcggccgcgagcacgtcggacggcaaggtgacgtacacgtcgacgatggagttcatgtgcgccccgttgacgacgagacgaccgttcttcagctgctgttggctgtaggtctgcttcatgtccggtgtcaccggcagattgaccgcggtaccgccctcggccgtgtacgtggcagtgaagctcaggccatcggtgccggtcaggccgggttcggcgtaccgtccgacaagcaccttgccgtcggtcaccttctgctcggccgcgtcgacagccgcgtacgaacccttccagctggtcacctcagtggccttgtggaagttggcgccacggttcatcaggtcgatggcgatgtcgccgacgcgcttgttccagttgtcgtaatccttgcggttctgctgggtccagccgacctcggcggtcgccatcatgcgggtgtacatcaggaattcggcgtcgttgagagaacgcaggtgctcgctccacagcgcatcctcgacgcccagaaccttgtcctcggtggtgccggcggatgaggtcgggttccactggtagaagttgctggtcgtgcaggcgccgcacgcccaggtcacgccagtggtctcggtgccgggacgctgcgggaagtaggtgttgccggccggcgacatgatgatcttgccgttgcgctggttgagcagcttctggatgctggcattgttggctgcgttgccggtccaatgctgcaccacggatccttcggggatctggtcaaccgcgtcgaggccgtcgttccacacgatggtggtcttgtcacgttccttgaccagcgctccggaccgtccgagatactcctgtagacgttccgtcttgttgccggcgccgccgctgaggaacagctcatcgccgcccaggtggaagtacatgcgtttgagctcggacgcaggcatggtggacgccttgatgcccttgtcgatcatgccgtcgagctggtccatgatatgccccagcacggtgtaggtgatgtcggcatcagtcgcgaggctgctcctgccctgcgcagactggatgaaggcgggggtgtcctcgccggccgcaggcttcgggttggagttgccggtgttgagctcggcaaggccgtgcagcaggctgaaggaatgtccgggaccgtcgatctcgggcacgatggcgatgccgtgatcggcggcgtaggcgaccagttcgatgaactcgctctgcgtccagtagccggtgcgcccgtcctgtgccggggaccagttgctggtccacgcggactggtagctgatggcgccggacttgatcgcgagctgcgtgtagtcggtcgtatcgccgtccgcacgcccgtcattggtgatctcgacgcggaagccctcgtcctcgctcaggtgcaggtgcagcgtgttcatcttgtaggccgacatcacgtcgatcatctgcttcatctcatcgagcgggtagaaggaacgcgccgggtcgaccagcacgccgcgccactggtaacgcggggcgtcggcgatgttgacggccgggatgaaagcgacatcggcaagcttcaccgtggagttcgtccacggaccgatcagctgcagcaacgtctgcgccgcccatatgcccgcggtggcgctgcgggccttgacggtgaccgagtcggcgtcggagacgatcgtgtaggcctcatcggcggtgatcgactgggcggaaccgacgtgaccggtgacgtccaggttctcgtcaagggtgaaggtgatcgggcagttcgtgccttcggcgagtttcaggccgtacgaggtgccgagctcgtcacgcatgacgtcaaccgcaggcaggaggctgccgtcgctcacggacacgcaggtgttcttcttaagttcaaacgcctctccgtcagcggattgcgcatatagcggcctcggggtgagccggctcaacgggtcggtggcaactgccgagatggtccccatcgtgcgcatctcccacacggaaagcgaccaggattggctcttcgtggtcgcgatcatgcggatgtgccgggttttgatcggcgtgtcgaatgtggttttgacccattgcgcctgtgccgtcgccttgagtcccgtcttcacatcggtccagttggagccgtcatcggaagtctggatggagtaattcgtcgcataggtgttgccccaggcgatgttcacactggaaatcgtcgcttcgccggggaattcgtaggccagccaccaggggccgctccccctgtcggcgctccagcgcgaggcgccggatgcgttgtgcacgcttttgtcggtggggttgtccggcagatcctggttgtcggcggccagttccggcccgaatccggaactgacttcgcgaccggacgcggtgaccgtcgccatggtcgcgaggttggacactgtggaagtggatgattccgccgctgccgccgcctctgcgttgtgctgcgccaaggccgatgaggccggcaccagcagcatcgccgatgcgcagatcagtgacatgaatcttgcgaggccacgtcgtttgatattcatgggatgatggctctttctctgtatctcctggcaggctcgctattgaaccacaccattatccggcctattgaatggaccgcgactttacaatccagcgtcaatatatcacgtcatcccatttttgtaaatatagtgcacaaaatgagcgagtcttgacatcacttatggaaagacccccgtcggcagcgaaacggttgctgacgggggtcttcaacgggcgcgaggggcccgtgcgtcaccttatgccaatgcggcggcgaagtcgtccgcggagttgacctgcgcgcgcttcttgatgacggcgagaatcttctcgcgcgcctcgtccaccggcacgccgttgagctggctgccatcgcggaagcggaagctcaccgcgttgttgttcatatcctcttcgccgacgatgaggatgaacggcaccttggacttggaggcgttgcggatcttcttcccgaagcggtcgtcggagtagtcgatctcgcagcggaccatctcgtcctccagcgacttgacgaaaccggccagatgcggcgcgaactcgtcggccaccggcacgccgagcacctgcacgggggcgagccatgccgggaacgcaccggcatagtgctccagcagcacggcgaagaagcgttcgatggagccaaacagggcacggtgaatcatcaccggacgctggtgggtgccgtccttcgcgatgtattcgagctggaaacgctcgggcaggttgaagtcgagctggatggtcgagacctgccaggtacggccgatcgcgtcgcgggcctgcacggagatcttcgggccgtagaacgcggcgccgcccgggtcggccacgaggtcgaggtgggatgcctcggcgacctcgcgcagcgtgcgggtggcctcttcccagatctcgtcggaaccgacgtacttgtccggatccttggtggacagctcaaggtagaagtcagacaggccgaagtccttgagcaggttcagcacgaaggtcagcaggctggtcagctcgtccttcatctgctcgcgggtgcagtagatgtgggagtcgtcctgagtcaggccgcgcacgcgggtcaggccgtggacctcgccggacttctcgtaacggtacacggtgccgaactcgaacagacgcagcggcagctcgcggtaggagcgctggcgcgacttgaagatcagattgtgcatcgggcagttcatgggcttcaggtagtagtcggcgcccggcttggtgatgttgccgtcggcgtcgtactcctcgtccaggtgcatcggcgggtacatgccgtccttgtaccagtgcaggtggccggaggtctcgtacaggccgcccttggtgatgtgcggggtctgcacgaagctgtagtggtgcttacggtgcatctcacgcgagtagtcctccatcgcgttgatcaccgcggcgcccttggggtggaacacggccagaccgggtccgatctcctccgggaaggagaacaggtccatctcggcgccgagcttgcggtggtcgcgcttggcagcctcctccaggcgggtctggtaggccttgaggtcctccttggtggcccacgcggtgccgtagatgcgctgcatggtggggttcttctcggatccgcgccagtaggcggcggcggaacgctcgatcttgaacgccttgatgaagcgggtgttcggcaggtgcggtccgcggcacaggtccttccagacggtgttgccgtcacggtcgacgttgtcgtagaagctcagctccttgccggagacctcggtggcggtggacgggtcgagatgcgcttccttgtcctcgatcagctcgatcttgaacggctggtcggcctcctccttgagggcctcctcctcggtgaccacacggcggcggaaggactgggcggacttgacgatgcgctgcatgtgcttttcgatcgccttcaggtcgtccggagtgaagggttcgtcgacctggaagtcgtagtagaagccgtccttgatgatcgggccgacgcccagcttcacgttcgggaacagctcctggaccgcctgggccatgacatgcgtggcggagtggcgcatgatgccgaggccgtcttcggaatcgatcgcgacgggttcgaccgcgtcgccgtcgctgagcggcgtgcacaggtcgcgcagttcgccattgaggcggacggcaatgatgtccttgtcatccgcgaagagctcgacgccggtggtggttgcttccacctccttcgcctcgccgttgactgtgatggagatggagcttagcgccatgatgtgtcctttgctatcggggcccgcgttaccaatgtgcaggcctggactggtaatcaacagtggcaacgataggaacccacgcagacaatgcctcgttcatgctccgtggccggggccgccgggcatgcgaacggggccgtcgccgcggttcccgatcatggggagaaccatggcgacggccccggcaacgtaccttggaggcggagtatcagtccttctttctggaaggcttgatgccgcattgttcctcaccggtgccctccagcgcggaggctggagagaagttcagcaggttggcggaggaggcgcccttcacggcaccgaaaccggagggcttgcctgccgccggcgcttcgacgggcgccttggcttccggttgcgcggccgcgacggcgtcctcgtcctcgctggcgtcctcatcctcgaactccttgcgtccatagtagaggtccttgtcgaggtccttctcggtggcggccacgatcaccgccgtgttggcggcaccggccacgttgagggcggtgcggcccatatcgacgatctgcgagatcggctggctgatcgcgatgaacgggatcggcagaccggccgccgcgaacagcgaggtcgcggtgatcgtcgcggtgccgggcacgcccactgtgccgatggacacaagcagggcgagcaccaccaggaacaggaactgggcgggcgagtacgaaattccctgggcgttcactgcgaacacagcgagcagcacgggccacacgccggcgcatccaggcatgccgaggttcgcgccaagactggcaacgaaggacgcgatatcgccgggcacgccgttggagcgcaggttgcgcacggtcacgggaatcgtgccgatgctgctttcggaggtgaacgccaccacgccggtgggccagtatgccttgaagaacggaatcgggctcaggcgcgtcgtgacggacaggatgagcggctgcacgacgaacagctgcaggatcatcgcgacgtacgcgaccacgagcacggtgaccagcggtagcagtgccgccacatcactgttgctcacagcggcggcgatcagcgcgagcaccgcgtacggagtgaatccgacaacgatctgcgtggccttggacagcactacgttgccggcatccacgaacgccttgaacggtttgacagccgcggcgcccttggcggtcttggcggcggagttgtaggcgacggccacgaggatcgcgaagatcaccacgggcacgacctggttggaataccagttctggacgaggttcgtcgggaacagcgccacaatcgtgtcgagcacagcgggcacctcgcgctgctggtagtcggtgggcagcgtgaacttgaagccctcgcccacgcggaacagcagggccaatcccagcgtgatcagcgcggcggtaaacgtattgatgagcaggaacaccacggtcttgataccgatgttcctcagcttgagcgattctcccagattggtgatcgccgcgatcacgctgaacagcagcaacggcaccacaatagccgcgatcgcgttcgaccatacgctgccgaacgccgccacatagtcggtatgtcccttgaacgcgataccgaccacaatgcccagtacggtcgcgatcagcacgcggacgctgaatcccgctttcttcctgatactcagataagccaaacccgcaaacagcacaacagtggcacccagcgccacccaattccatgccgtatcggacatgtcatctcctttcgtgtcatgacgacgcgacgcctgatacaggtgcggcaccgctcttgattccatcgattcaccgtacagtagcggacgaaacaacatttcggaagtgctatcggttttttcgataagggcttaacagtaccgcttcaaagttgggagcagaggactgcggcaattacctaaatgactgaagctcttacgccggtaggtgaaacgcgaagcgagcagcggggtattgtacgggcgctgaaaacaccgtatccgaagccccatagaccagagcggattgatggagcggacaacgggactcgaacccgcggtctcaaccttggcaaggttgcgctttaccaactaagctatgtccgcagtataccgatacaagaccggcatcgtgggtgatgtaggaatcgaacctacgaccccttccgtgtgaaggaagtgcgctagccgctgcgccaatcacccgcaaacaacaaatgttcattttacgtgacatcatcggcgagcgcaaccattacggcgagccgccatgcagtccgcggctacgacgaaagcacatgacttgaacaacgcagaccgacacgcgataatcgacgcaacgggggcaaaggagacgtcatgaccgaacagcagccgcaggaaccctatggcgatccgcaatacgagtcatacagggaaggcacgccgaccgagtcagtgccgaccatatcaatgccgaccgagtcgatacccaccacaggcgcgtcgggcccgacaggagcatcacggcagcgccaggcaccacaaccgcacaccccatacggattctcttcagccacgcggcctcccacatccgggccgtatgcgcccggccctttcccgactcctgaagcccgtgcgacacagggctcatacgaagcgcccgccccatggtccaggacgctcaacggcgcatcatcgtcggcatcatccccgttcaccacgggccaaacaaatcgtcaggcccatcccccatacccgccgtacccgatgccgccataccagcagtaccgcccgatgcagccccccgaggaaaacgggcatcggggcgggcggcatcacggcgatagtcgccgccgtaatcgtcatacccgcgctgctgttcatcgccgtgaccgccgggctcatgacggtggcgaagaaccatatcagccaaggcgccaacgagccgaccaacagctacggcaacgcgtctccctccgacccgaatcaggccgaccccgagccgacctccaccgtctaccgcatggacgagcggcccggatacgagagcatggtgacctacgtgaccgacaaactcgaccattacaaggacgagatactcaacaacaacaccatgttcatgagcgaataccggatacccgacacgcaggacggcaccgactacatgacgggatacatggcggcgttgctgggcaccgtgaacgaggccaaggcggcagcgaacgagaccagcgaggaccccgatgcgctggatgcgaagatcgactcgtaccgaaccaccgtcgacacccttgaagcacggttcaagaaagggcaggcgctcggcgtttcgatgaccgttaccggcaacgatggcaagaagtacacggtcgacggcagcaaatcaatcacgctcaggcctacctgggacgagctggaacagcgcgtcgccaaagcctcgaactcgctggggagtggcaacgccgccagcgcgcagaaactggtggagctcgcggacatgaagctcagctgggacatcgacgagggattcagacagttcccggcgtttgcgggtaccgacgacggcgacaacaaggcgctgacgaagtccgagacgttcggcttctactgccctgccacgccgaacgtgatctacggcaaccgcagcatgcccgactggaacatgacctacgcgacggccgcgggcgtgaggcacgagctgtcccaccacgccatccacatgcgctgcggcaccatcgagcccgaggccgtcatgcagaacggcgtgaaccgcaccgaaggcgtgacgaacagctacgcggtcaagtacatgggcgcgaaccgcgccctgatccagcagagcatcgattacgcggccagcaccgggcacaagcagtatcgcatggatgcgttcaccgaccgggccgcggaacgcatccactccgggcaatgcaacgcgggatgagcaatcgggcggggttctgaagtctaattgcgtttcgagggggtgcttcaggctcgttcggacatctatctgcgtttcgaggggttggtgcccgagtagagccgggccggaaaccgcatgattccaatgcgggatgtccccgcatactccggatatcgcgtttgggcaaccccttgaaacgcagatagatgttccgagagcgcgaaatcaacccctcgaagcggagataccgggtatcagcctgccagcggaggcaataaggcacggtaaaacgggttataggccaaaaaacacccgaaggcgctacatataagaggaacatggtgggcgatacaagattcgaacttgtgaccccttccgtgtcagggaagtgcgctacctctgcgccaaccgcccgggtctgtatcatttgacggaaaccattatgtttcggattccatgcaaacgagaggtgggtacgagagtcgaactcgtctatacggctttgcaggccgctgcctaaccgcttggctaacccaccgcaaaggtcgtcaactcttcggaccttagagcggacaacgggactcgaacccgcggtctcaaccttggcaaggttgcgctttaccaactaagctatgtccgcgtttccttgaccagcgtcatgccgttcaagcaacggattacaactataatgacaaccatgggatttgccaaatccggcgtgtcgcgcgatgtcacggcctgcgaccgatcacccacaggccttgccataccgcgattctctgatggcataagccgcctgcaccagccgcgaggaaccgttacattggttgatatgagtgaagaagcgaaagcgcatgaaccggtgatgatcgccgcattcgaaggctggaacgacgcatgccaggcagccaccaacgtcatccggcatctcgtgtcgcgctacgattcacgcgagatccgccacatccgctgcgatgggtactacgactaccaggtcgcgcgcccgatgctgtgcaaggtgacgggccgacgccggatcctatggccgcagacgacattctacgccatcgacgtggcgccctcgacgaccctgtatgcgcagatcgcgcccgagcccaactaccgttggaacgactactgccgtcaaagcatgcgcatcgccgaggagcttgacgtccgccatatcgtgaccatgggcgccatgttcgccgactgcccgcacacgcgcgcgctgccgctcgacatcagcgaccagcagtgtcagtgcgacatggaccgggaatacagcggccctgtcggcatcccgaccgtgctggattgcatggcatgcgaggagggattctcgaccacgtcgatgtgggtgtccgtcccgcaatacctcggcagcgacgaatgcgcgcaggccaccatgcagatgctcgcggcattgtccgaccgcatcggcgtcgagctggatccgggcgacctcgccggcaaggccgaacagtggaaggcgcaggcttcggtgctgacgcgctgcaacgacgacctcgcccaatacgtgaaacaccttgagcatgattacgacatgcaggagaaagccgatcaggtggcgcgcttcggcgctccggccgcggaacagctggtgcgcgaggcagaggccttcctgcgcagtcgcggcaagtgacgcgggccgcataatctcacgtcaacgcaaatggcgtccgttccgcgaagccgcgaaccggacgccatccaagcgtgtttcgtgacgttacagcgatgaccgcaacgtcaccctgccgccgtcatctgaccgcggctgcggattgctccacggtgacgatgctgaccggattgacgacgctggcctcgctggcggccttcaccggctcatacggcttcagggcgccgaacagcagcagcagcgcgacgatcaccgacaggccgatgcgatagatggagaacgccttgtacgagaacgtggagacgaacttcaggaacccgatgatgacgatgtagccgagcaggaagctgatgatcatcgcgatgatggtcggaatccagccggggaacatgcgatcggtcccggcgttcttcacggccttgaccgcttcgagcaggccggagccgaacaccgcggggatggccatgaggaagctcagacgcacggccgattcgcgcgtgtatcccagcgcacggccgacggtgatggtgccgccggagcgggacacgccggggatgagcgccatcgactggccgagtccgaacaggaaggcgtcgcgatagttcatgtcgtccatggtcttgatctgccgggagcgggcgtccacgatccacagcagcagaccgaacaggaacagcacggtaacggtgatccacaggttgcgcagcgacgtctcgatgatgttctgcagcgtgaagccgaggatgatgatcggaatcgagccgacgatgacgttccatccgagcgtcgcgtacttgtcgccgcgacccatgcgcgcacgccagtccgggccgttcttgccgaacaggcatccgaaccagtgcgacaggatgttgatgatgtcacgacggaaatacaggatcaccgcgagctcggtgccgatctggatgatggcggtgaacgccgcgccgggatccgcgcccagcatcagatctccgatgatgcggatatgcgcgctggacgacaccggaagatactcggtgagcgcctgcacgattcccagaatgatcgcttggaagaaattcatgatccctcttgaatgattgtccgtcctttaccgtggacaagggtactcaacgtcccctaagaacgtgccaaacatcgtattgtcgtacagaaaacccacaatgaggggtggtggatagtcgggacgtcacggggaggaattatggcacgataccgcaagtcaaggatgtgggcgccgcaggactttttcgagtgcgagggccgcggtctgcaatggctcggcgaggcgcaggcgcagggcggcccccgcgtggtggacgtctacgaatggggcaaggattttctcgacatcgaacgcgtatccccctgctcccccacggccaaggcggcccacgatttcggcgcggccctggcgcggatgcatgacgctgggacggaccacttcggctcggctccggccggatatgacggcacctgctatttcgggccgctgcaggatccggtgccgatggcgaccggcgcgtgggatgacccgatcacctatttcgcgcaggggcggctggtcccgatggtcgaactgggcatgcgtcgcggagagctgacccaggccgacatggacctgacgaaccgcgtcatcgacgcgatgcccgaccttctggggcgtgcggcgcaggacaagccggcacgagtgcacggtgacctgtggagcggcaacgtgatgtgggccgacgaccgaggctcgtgcgaggccgtgctgatcgacccggccgcacacggcggtcaccgcgaggaggatctcgcgatgctgcacctgttcggcatgagctatctgaccgagatcatggacggttaccagagcgtgcatccgctgagggccggatggcaggagcgcacgacgctgtggcaactgtatccgatcgccgggcactgcgtgttcttcggcggcgggtacatcagcgaataccgttccatgtgccgctcgctgctcaagtagcaggagcccgcaacaagaggcatatgtacgggaaagggctttcagaccagagtgtctgaaagcccttttcaatgccgaagccgctgatcggcgcgaatgacgagcgctgccgagcatggacgggcatagccgaattcagctcagcgcgtccttcaacttgctgaaaaatcccttgcgctggctgccggtggcggggcgcgagctctgcgcgacgtgcgacgccgaggcgtcgtggctggccgcgaactgctcgatgagcgaacgctccgagtcggtcagcttggtcgggatgtgcacgttgacatgggcgacgagatcgccgcgctcgccgggttggcgcagcttggtgacgcccagattcttcaggacaatcgtctcctcgggctggcatccggccggcacggtcaccttctgcttgccgtcgaaggtgtcgatctccatgtcgtgacccaatgcggcccagctcatcggcacctgaatccagcaatgcaggtcgtcgccgctgcgggtgaagcgcttgtcggccttgatgcgcacgtcgacgtacaagtcgccggccgcgccgccgccttcaccgacctcgccctgatgggcgaggcgtatgcgcgattcgtccgcgatgccagcgggaaccgagatccccacctcgcgcgatgtccggacgcggccgtgccccatgcaggacgggcaggggtcggagatcaccgttccgtgcccctcgcaccgctcgcagggcgcggaggtcatcatctgaccgagcatcgtgcgcacgaccttctgccggaacccctggccgtggcagtccgggcaggtggtgggctgagaaccgttggcggtgcccgagcccccgcactgctggcacagaccgaaagtattgatcttgatgtgcgtggtaccgccgaagaccgccgtcttgagatcgatggtggcgctcgccagcgcgtcgcggcccggctgggtgcggggaacggggccctgcgagccgccgttgaacgctcctccgaagaactggccgaagatgtcggacatgtcacccatgccgaatcccgatgcgccgccgaatccgcccgcattggggtcgttggggtccacgccggaatcgtacatgcggcgcttgtcggggtcggagagcaccgcgtaggcgttgttcacttccttgaacttgtcttcgtattcggggccggcgatatcgggatgatacttgcggctcatcttgcgatacgcttttttgatctcatcgtcgctggccgacttgtcgacgcccagcacctcgtagtaatctgccactgctcgttctttcttgttggtgttcggggagctattgtgccataaggctcagtcagttgccgtcgccgtcatcgtacgacgatatcgcacgggtcaggtaccgggccacggcacgtacggcggctatggtcgcggcatagtccatgtgcgtcggtccgatggagccgacgaaggccaccggcccgctggattcgcccgatccgcccgacccgccgtcgagagatggcatcgtgacgctatcgccatcgtccattttgccgggctccgcgtcggcgtcatccgttatgcggggctcccccgccatgccgttctgagccgtattggcatgcgtcgcgccgccaagcgcggatccaccgccgtcttcatgtcccgcgtccgattccgccggttccgtccgggatgccggcgagtttccgtagccgctggtgaccaccgaagcatgcagcagttccggcgtgtgcgtctccgaaccgatggctacaccgaccccataggcgtcggtgtcctccgaaagcgcgctcatgagtttcatcagcacgatctgctcctccagcgcgtcgaacagcggcgccatgtcggcgatgtcacgccgatgggccaggtgcgacgcgccggccatatacagttcactggacctttcgttgtctcccatcgcctcgaacacctgtgccagcccttcaagcagcgcaacggattcccgccgcgacgacttgagggaacggacccgttcggcagcctgcgcgaaggtgagcccgaggcaggctccgttcacgacggatcccacgtcggcgagcgtgatatccgtcggctggggcgacagggcgagcgtatgctgtgcgacgttgccggtgtcggtgatgaccacgatcagcagcaacgtggatgagacggggacgatctgcacgcgcagcaccttcgccttggccggggacggggaggcgaccacggccacctgaccggttatgtgggaaagcagtctggccgcgcgctgcaacgtgtcctgcaggctgacggatccggacaggaacgccgcgattcccttgcgctgcgcgtcggagagggggacgacggtggacaggcggtccacgaagtaccggtagcccttctccgtcgggatgcggcccgaggacgtgtggggctggatgagatacccctcttcctcgagggacgccatgtcgttgcggatggtcgccgagctgacgccgaggtcgtgcttcttcgtcagagcggccgatcctatcggctcctgggatcgaatgtaatcctccacgatggcgcgaagcaccaccatgcgtcgtggttgcgccatgtctcctcctgtccttccccggcattcacgccttcacggctttcccgtattcacgacacgcccgacactcccggagtggggtcggtcgaacgatgacgtacccagtattagcactctttgcccttgagtgctaacgcgttcgttatcagatgatttcatgacgcagccgccggcatgagtcagtcacaagttgtgagcgctaacataacaaaatctaccaaaacacgccaaaatcgaaccattaagtctgttcacaacgttagtatgggattgcaatgtgagggcatgcatggcgcggcataagccgaaatgcgtggtgcccgaagtattggaaggaaagtacatccatgaccgaattcaaggagaccgagctggacgagcgcgccatcaacatggccaaggtcctgtcggccgacgcggttgagaaggctggaagcggccaccccggttcccccgtctccctggcgcccgtcgcctacaccctctaccagcatttcatcaagcatgatccgaacgaccccaactgggaaggccgcgatcgcttcatcctttctggtggccacgcttcgctcacccagtacgtccagctgtacttctccggctacggcgtcactctggacgacctcaagcacttccgcggcggcgcggacacccgcaccccgggccaccccgagtacggtctgaccccaggcatcgaaatgaccaccggcccgctgggccagggctttgcctccgccatcggcttcgcctacggcgaacgcttccagcgcggcctgctcgacccggagaccccgaaggaagagtccccgttctaccacaagatctgggccatctgcggtgaaggcgacatcgaggaaggcatctccggcgaagccgccgctcttgccgccaaccagaagctcggcaacatcaccgtaatcttcgatgccaaccgcatccagatcgaaggcgacaccaacctggtgctggccgaggacgtgctcaagcgcttccaggcctacggctggtacaccgacgaattcagcttcatccagcccgacggctcctacaaggaggacatcgagggtctggccgaggtcatcgccaaggccgagaaggccgcgcctgaccagccgaagctcatcaaggtccactccctgatcgcatggccgaccccgggcaagaccaacgacccgtcctcccatggctccaagctgggcgccgaagccgtcgccggcctcaagaagctgctcggttacgaccccgaagagtccttccacgtcgacgaggaagccctcgcccacgcccgcaaggttgccgagcgcggtctggaagcccacaaggaatgggacgagaagttcgacgcctggcgcaaggccaacccggacaaggccgccctgtacgaccggctgaaggccggcgagctgccggaaggcttcgacaaagccctcgacgatcttgaggcgaccttcgaggtcggcaagaaggtcgccacccgtggcgcctccggctccgtcctcaacgccatcgcggccgtcatgccggaactgtggggcggctccgccgacctcggcggctccaacaagaccgatctcaagggcgctgccaccttcgctcctgcggagtgcgccaccaagcagtggccggtctgcaacgagttcggacgtcagctgcacttcggcgtgcgcgagttcacgatgggctgcatcaccaacggcatcctgctgggctcccacacccgtccgttcggcggcaccttcttcatgttctccgactacgagcgctccgccgtccgtctggccgccctcatggagatcccgaacctgtacgtgtggacgcacgactccgtcgccgtcggtgaggacggcccgacccaccagccggtcgagcaccttgcctccttccgcgccatcccgcagcttgaggtcatccgcccggctgacgccttcgagaccgccgaggcctaccgctacttcttcgagaagaagaacacgctgcctggcgccatggtgctgacccgtcagggcgtcccggtgctcgccgagaccgccgccaaggccaaggacggcgtgcgcaagggcgcttacgtcctggtcgacaccgagggcaccccggacgtcatcctcatggcttccggctccgaggtccagtgggccgtcgacgccgcgaagaccctggccggtgagggcgtcaaggctcgcgtcgtgtccgtgccgtccatggaatggttcgaggagcaggacgccgagtacaaggaagccgtgcttcccgcttccgtcaaggcccgcgtgtccgtcgaggccggcgtggcgatgccgtggtacaagtacctcggctcctacggcaagcccgtctccatcgagcagttcggtctgcagggcgatggcgcgcagaacatgatcgacctcggcatcaccgccgagcacgtggtcgaggccgccaaggcgtccatcgcggaagccgaagccgccaagtgatccatcgggagccgcccgccgaggcgaatacgcggcgggcggctccctcccggtcggcacggccgacaagcccctcgcgggaggggcgccattgaagatttgttccattacggaatcaaaggagaaaacaatatgactgaagcaactcagcgcacgtccgacaacggcgtctcgatctggctggacgacctgtcccgcacccgtatcgagtccggctccctgcaggagctcatcaaggacaagaacgttgtcggtgtgaccaccaacccgtccatcttccagaaggccctgagccaggtcggcccgtacgacgcccagctcaaggaactcggcaaggtcgacgtcgagaccgccgtgcgcgagctcaccaccaccgatgtgcgcaacgccaccgacatcttccgcgagatcgccgaggccaccgacttcgtcgacggccgtgtctccatcgaggtcgacccgcgtctggcccacgacaccgagaacaccgagaagcaggccgtcgagctgtgggagaaggtcaaccgcccgaacgcgatgatcaagatcccggcgaccctggaaggcctgccggccatcaccgccaccctcgccaagggcatctccgtcaacgtcaccctgatcttctcgctggagcgctacgagcaggtcatcgacgcctacatcgagggcatcgcccaggctgccgccaacggccacgacctgaagcacatcggctccgtcgcctccttcttcgtctcccgcgtggacaccgcggtcgacaagctgcttgaagccaacggctccgatgaggccaaggcccttgagggcaaggccgctgtcgccaacgcccgcctcgcctacgagctctttgagaagaagttcgccgccgatcctcgctgggctgacctggccgccaagggcgccaaggtccagcgtccgctgtgggcctccaccggcaccaagaacgccgcctactccgactgcaagtacgtcgacgagctcgttgccaagcacatcgtcaacacgatgcccgagaagaccctgaacgctctggccgatcacggcaacggcgctccgtccatcgagggcacctacgaggagtcccacgccgtcatcgacaagctggccgagctgggcatcaacctcaaggacgtcaccgacaagctggaggccgacggtgtcgccgccttcatcaagtcctgggattccgtgctggccgacgtgcagtccggcatcgaccgcgtgaacgcctgagaccgaccggtcaagcgtgacatacgcctgaccacataatcgtgagaagcccccgacccgataacggccgggggcttctcacgtgatacactgctagaccgcacacgaacgccatgtcgaaaccgggaaaggccgtgaatggcgccccttcgtgtatcatgccgaaggggatttctctcgccgcgaacatgcgccagcgcatcactcaagcagaaactacaaacagaaggaccgtcaaccacatgaacttgcatctggcagaggcaggacgcacgctgattccccgcaaggatgacgaatacgggctgctctcccccgccatggtgctgatgacgttcatcgccggtctggtcgatgcactgagctacttggccttgggacatgtgttcgtggcgaacgtcaccggcaacatcgtcttccttggcttcgcgctcgcccacgcacaggggttcgtctggtggacatcggcgctgacattggtgtgcttcgccttcggcgcgttcatcggaggccgcatcatacgccggttcggagaacaccgggcccgccatctgctgatctcgtcgatcgtgcaggccgcgttcatcctcgccgcgctgatcgggctgtacctgctgaaccactattccgcggaaccggctctgggcatgggcagtatacaggcgtcatcgcagccgagcctcaacttccccaccgcccgccacatcgacgtccatcatctgatgctgatcgtgctgatcgcccccgcgatgggcatccagaactccactgcccggcggctcgcggtgcccgacctgccgacgaccgtgctgacgatgaccgtgaccggcatcgtcgccgacacatccgcccacggccatgagatgtcaaaactcggccggcgcgccgtcgccgtattggccatgtttctcggagcgctgacgggcgcggcgctacagtcgaaaggacatgaggacatcatcctcatggtcgctctggcttgtctgctggccgtgatcggcatgatgctcgcgcacgcgcattccacggcggcatgggcgaccgcccgccactgacctattccccaacgcacagcaatgtgttaaactgcgctgccatgggcttatcacgggtcgggccacccgacgcgggtggattcatgccgaccgccgggaaccgagtccgaaacaggcgccgagaagacaggcgccgagaagacaggcgccgagccgccgcaacagaaagcagtaccgttatggcaacgactcccataccaacagacatcaacaccgccgaatccggcggtcggcgccgtctcccgttctccggacgcctcgtcatggcgttcacgttcttctcgatgttcttcggtgcgggcaacctcatctttcccccgttcgttggggcgcaggcgggcgctgccaccgttcccgccatcatcgggttcatcgtctcggcggtcggccttccgattctcggcgtgctcgccgtcacgttcgcgggtggcttcgacgagctcgcccgtcgtgtgtccccggcgttcgcctcgctgctcggcgtggcgatcatgctcaccatcggcccgtgcttcgccatcccacgcacggcgaccacgtcatacgagatgatggtggcgccattcctgccctcccgcactggatggggcggctggacgacgcagctggcgtactcgctggtgttcttcgccgtggctttcctgctggcccagcatcccgagaaactgtcggccgtgttgggacggttcatggggccgctgctgttggcgttcatcgcagtgctgttcatagcctgcctggcgcatggtgcggtaacaccgacgcaaccgacaggcgattatgcggtgcatcaggcgtcccggggcttcctggacggctatcaaaccatggatctgctagctgctttgtacttcggcatcgtgatttcggcgaacgtccgcgccatgcatgtcaccgacaacacgcttattcgtcgggagaccgcatacgccggtctcggcaccgggatcctgctgatcgtgatctatgcggtgctcggctatgtgggtgtcgtgtccgggagcattgcctcggtcaatccagcgaccgatacaggcgcgaccgtactcaccaatctcacggcctcgttgttcggcacgttcggcatggtatttttgggcatcgtgttcgtcatcgcctgtctgaatgtctgcacgggtctgatctgcacgtgcgccacatacttccacacgcgattcgccaccgtcgccggtcgccgcgtgagctatcgcgcatggcaggcactgttcaccgtgttcagtttcgtggtgtccaacgccggactcagcatgatcatcaaggtgtccgtgcccgtgctcgccgcattgtatccgattgccatcgtgttggtgacgctcgcattgacccatcgaatcctcgccgctcatttcccgcgcgtgtacttctggatggtactgctggtggccatcgtgtcattcgccacatgtctggcgagcatcgtcacggtattcggcggctccctgccatggctagaggccatattgaacatgctgccgctgcagcaattccagctgggatggatcattccggcgctggcaggcttgctcatcggcgtgcttgacagtgctgcacattcgtcgttcaaacgatgaccgactgattcgagggctatcttcgtttcgaggggttgattgaggctcgctcagacatctaactgcgtttcgaggggttggtgcccgagtataaacaccatgggaaccgcatgattccaatgctgaacaccccgatatactccgggtaccgcattcaggcaaccccttgaaacgcagatagatgttccgggacgccggaatcaacccctcgaaatcgagataggagatggaacgcgtaggacgactggggtggtcatcacaaactacgctacggcgtccgacactccttgaaggccgtgtcatcgtatcgccggataccttgggtcagattagagagctgataggctccatcgtccgttttggcgagcaggacaatgatcttggtctccgcaccatatttcacgatgagatcgtccttggcacccgctccttcgcatccaagattgacggtgaccgtgatatcactaccttccacagaccccttgagacgcgtccagatttcagcgtcatgtcatacagatcctgttggtcgccatcggcttgcttcatcctgtcaatcgtggcaacggtgactattcgatgcagcgacggcatcgctgagattgccgtactgcacgccggcgtcacaggccacggaaacgacccgaccgccgcatccggcaaaaaccagtatcatggctaagaccgccagtattgccggaacccgcatcctcgtctgatgatatgaacgcatcgccatcatgtctccttcgacatcaagccggtgctcgcccggtccgggcgctcccgcctccttcccatgacaccattgcacgaacatgccccccccaatgagcattggcagccggcaatacggcgggcgccgccttcaccggttcttggcatcatccgcgatcctgccccgtgtcagcgaacggtaggtgacgtagaacaggatgcccgcgacgatgccggaagtcgcgtcggagatcggctcggcgaggaagatgccggtcactccgatccagtgaggtagtgtcagggcgagcggcaccagcatgatgatcttgcggaagatcgccaggaacacggactgcttggcctgccccatgccgacgagggcgcactgcgcgcccatctggatgccgaacacgccccatccggcgacgaagaccggcatcatgcgggtcacgatgccgatgacttccggcgacgacgtgaaccatgcggcgaacacgcttgggaatgcggcaagaagcgacaccagcaccgtggccgaagtgatctgcgcgatgaatgccacgcggatggcctgccgcacgcgatccatgcgccgggcaccgaagttgaacccgatgatcggctggatgccctgctggaaaccgttggtcagcacactgaccacctgcatgagcgaggtgatgatggtcatcgacgtgacatagtcgtcaccgccgtatcgttgcagcccgacgttgaacaccacgttgatgaggcattcggtgatctgcatgatgaacggcgccaacccgagggtcaggatcggcacgatgactcgattgaagcggatgttggacggcctcaaccggatggcgctgcgcccggaggcgaggaacaggatgatccacaccgatgagatcaactgggcgatcacgttcgcgacggccgcgccctttacgccccagccgagcacgaagatgaacaccgggtcgaggatgatgctggtaccggtgccgatcagcaccgaggtcatcgcgccggtggtcttgccctgcgcggagatgaagttgttgagtccgagcgtgagctgcacgaacaccgtgccgaccaggtagatggtgatgaagtcgaccgcatatccgatgttggcgtcgctggctccgaaagcgcgcagcaccggctccttcgtcgcctgcaggatgacggtgagcgtcagggcgatggccacgaggaacgccgcgctggtgcccaggatgcgttcggccttcttgaaattgccgcgacccagttcgatggacgccctcggcgcgccgcccgcgccgatcaacgacgcgaacgcggtgacggccagcaggatcgggaagcagatgccaacgccggtcatcgcggcgtcgccgacctcggggatatgcccgatgaacagtcggtcgatgatggtgtatgaggcgttcgccgcctgcgcgacgatggtcggaaccgacatcgtcagggcgagccgcgcgaccggtttcgtgccgagcccggagctgtccgccgtcatgccagcagatgccgttcgatccattgcgcgacgccgtcatcgttgttgggcgggcagatctcgtcggcgatcttgatgacctcggggttcgcgttggcgaccgccacacccgtttccgatgtcgtcatcatgccgatgtcgataaggtcatcgccgaaactgacggtaccgtcgagccgcacgtccatgcgttcgcacagcgtcttcaacgcctgccgcttgttcgccagcggattcatcagcatccacatcgagccttcggagatcgccacgtcgaaatcgggcggaaccagcgtcttcagatgtgcccattgctccgacttggggaagataatgatcttgtcggcgataccgtcggggacgtcggtgaaatcggtgaattgccaagtctgtgtcttccagtacacgctcacgtcgaagttcgtgtagcgcacgtcatccatgacgatgccgaggctgaggccgggtatctcgtcgagcagataccggcacacctcgcaggcccgtgcggaggagaagccgaccttcagcagatgcccgtcggaggggagccgccccgaggtgagcagatcgtaatcggaacgttcgggcgcgaaatcaatcagggcaccgttgagataaatgtacgcgtcgaccggcaacttacccgcgtactcgaagccggtgctcaccggccgggcggtcgccaccgcgaaccggtaaccggcatcgtgcatgcgtttgactgtgtcaatgctgcgctgcgtgataaaccgctcctcgaaggtgggggcgtcatgcagcagtgtgccgtcgaggtcggtgacgatgagtcgctgttcagggttggtcatggcgtttctccgtaaagcctgtcagggggaaaaagaatcgtgccggtctgcggctacagcagcccttcgcagtaggagcggaccagctccgcggaatgatgcagcttggcgagctcgtcgtcggcaagttccagctcgacaatctcgttggcgccgttggcacgcagctcggtcggcacgccgaggaacacgtcgcgttcgccgtattcgccgtcgagcagggtcgataccggcacgatgcggcgttcgtcccaaaggatggtctgcacgatgccggccaccgtcgaggcgatgccgaagttcgtgccgcccttcgccgcgacaatctcgttgcctcgcgtacgggtcttctcttcgatctcatgcgtggagacggatgagaatcggtcggcgttgtcgctcaggaatcgcgtgaacggcttgccgccgagcgagacggtcgaccatgcggtgaactgcgaatcgccgtgctcgcccatcacgaaaccgccgacgttgcgcgggtccagcccggtctcctcaccgatgatggtcttgagacgcgaggtgtccagcgcggttcccgtgcccagcacctgggtgcgcggcaggccggagcgtttccacgcgtaccatgccatgacgtcgaccgggttggagaccatgacgatgacgccgttgaacccggatgccatgacccggtcgaccacgtcgccgacgagtccgatggtgaagccgagttcgtcgagtcgggttgagttggccggtggcttgcgtccgacggtgatgacgacgatgtcggcgtccttgcagtcaccgtagtcaccgttgcgcaccttgacgtgccggtcctggaattcgctgccgtcatcgagatcatggctttcgccgagcgccttgccggcggaatgatcgatgagtacgagctcgttgcacagaccatgggtgacgatggcgaacgccgcggtggatccgacctgcccggtgccgacgatgacgactttgttcctgttcatggtgaccatgtcagatgctcctcaaacgatatccgataaacgttgcccaatgaaatgagccatgatcaagtgaccatggctcaacgtgctgcatacagtgcttcagcgaatcgcgctcacaccaagttgaattttgtcatcagaccgagggcgatgatgatggcgacccagaccagtgcgatgaagatggtccagcggttcaggttcttctccgcgacaccagacgtgccggcgttctgggtcaggccaccgccgaacatatcggacagaccgccgcccttgcccttgtgcatgaggatgagcagcgtcagcaggatggacgcgatgacgacgatgatctcaagaacgatcttcagaatatgcacggggaaacctccattaaacgtactgtgtcatagcatagcgcagggcattgaaaaacgtgcggatatgcgcatgtttccctatcgacgtgtcgccttgagtgtcaaccgggcgatcttcgccaattcgtcggggtcgagcgacgcgccgccgatcaggaatccgtcgacatccggctcgccgatcagatgcgtcgcgttcttggacgacaccgatccgccgtataggatgcgcacagtatcggcgacggcggggccgaacatctcgccgaggtcgtcgcggatggctttggcggcctgctgggcggtgtccggagtggcgaccatgccggtgccgatcgcccagaccggctcgtacgcgatgatgagcttcgcggcctccttgtcggaaaggtcacgggtcacgtcatgcacctgtccgacggcgaagtcgagctcgatgccctggcggcgttcctcgaagctttctccgacgcacagtatcggctgcatgccggccgccaatacggcacgcacctgatcgacgatgttgacgtcgtcttcgggatggtacttgcggcgttcggaatgcccgacgatgacgtacgagcagccgaggtgcgcgatcatgtcagcggagacatcgccggtgaacgcaccctgtgtggtcaccgacacggcctgcgcgccgtagcggatcttgagcttgtcggcttcgaccagcacctggacgctgcgcagcgacgtgaacgacggcatcagggctatttcgcagcgggagtagtcgaagcgtgcgtcacgaagcagccatacgagtttctgcacgaaatacgtggcctcaagatggtcgaggttcatcttccaattgcccgcgagcagcgggatgcgtgacgccattgatgtcctttccgtatggagcggctccccggcgtcaagcgctcggggagccgaattgcgggtgaagatcagtcgaggaccttcagccccggcagctccttgccctcaaggaactcaagggaggcgccgccaccggtggagatgtgcgagaagccgtcctccgggaagccgaggttgcgcacggcggaggcggagtcgccaccaccgacgatggtgaatgcgccggccgcggtcgcgtcgacgaggccctgcgccacggccttggtgccggcggcgaactcgggaacctcgaacacgcccatcgggccgttccacacgacggtcttggagtcgacgatcttgtcgtggaagagcttctgggaatccgggccgatgtccaggcccatcttgtcggccgggatggcatcggcggcaacgacctccggggcgaccggggtgtcaccggccgggaagccggcgttgacgaccacgtcggtcggcagcacgagctcgacgccgttcttctcggcggtagcgatgtagcccttgaccttgtcgagctggtcctcttcgagcagggaggtgccgacctcgtagcccttggccttgaggaaggtgaacaccatgccgccgccgatgaccaggcggttggccttgtcgagcaggttctcgatcacgccgagcttgtcggagaccttggagccgccgagcacaacggtgaacgggcgctccgggttctcggtggccttggacagggccttgacttccttctcgaccagcttgcccgcggcggccggcagatcggcggccacatcgtagtcggagccctgggcgcgatggaccacgccgaagccgtcggagacgaagacctcgccgagggcggcgaccttcttggcgtacggggcgcgcacggtgggatccttgctggtctcctccgggttgaagcgaacgttctccagcagcaccacgtcgccgtcgttcatcgcggcgaccttggcctgggcatcctcgccgtaggtgtccttggccagcgggacctcgacgccgagcagctcgcccagacgcttggcgaccggggccagagacagctcagggacgaccttgcccttcggacggccgaggtgggccatcaggatgaccttggcgccttcttcgcgaagcgccgtgatagtcggcagcgcggccttgatacggccatcatcggtaatcgtggtgccgtccagcgggacgttgaaatcggcgcgcatcagaacgcgcttgcccttgagatctccgagatccttgagtgtcttcatgtgtatcctttcctatccgcatatgcgaggaatggccggttttagccaattcgaatattacaagcggcacggaacaaaacaccgcgcccatagcgaacatggacgcggtgcatgacgggatttgattccggcgcttctcaggagcagagggacgccgtcagcgtccgacggacgcgccggactgttcccggtcgcgggtcttcgcggtcttgtcggcgagctgtagcagacggcggatgcggcctgcgatggcatctttggtgatgggcgggtcggcgagacgtccgagttcctcaaggctcgcatccccgtgctcaaggcgcagctggcccgcggcacgaaggttttcggggatgtcgtcgccgagaatctcgaatgcgcggcgcactttctcgctggcttcggcagcggccttcgcgctgcggcgcatgttggcgtcgtcgaagttcgccagacggttcgccttgccccgtgcctcgccgtcggtgcgcttgcctgtccactcccttgctgagtgcggggcgcccatgaggatgagcatgcgctcgatggcgtcggggtccttgagcgtgatacgctccgaactgcgcagctgtcggggcttcgccgtgatgccgagcctgcgtgcggcgcccgaaagcgcgagggcggcctcgttcgacgggcagatgatttcaaggaagccggctttgcccgggtcggaaagagcgccatgagccaggaaggctccacgccatgcggccttcacctgagcgatgttgccgctgatgatatccgcgggaagtccacgcaccagacgcttgcgccgatcgaggaggccggtctgcaatgccaacgctgcaccgccgcgctccacgtggatcatgtatcgctgcaccgtggcgccgttgggcgtcgagcgagaaacctgggtcatgaccgcctcatgcccatacagatccctgatggtgtcctgaagccactgggcggccttgagcgagtcaaactgcgcttgaacgatgatctggcgctgtaccagccgcagcccgccgccgaaacgaatcatagcggtcgcctgcgcctttttcgccgcaggcaattcgttatcgattgcggccagctcgcttttgacatcatccagaagagccaagagccaacctcctatgtcctgtttcttctcaatgtttccccggcctgctgggttctgctccctgcactgccaccggcttactgtgatacctaatcacttggacaagaatacgcgatgctgccggattatggaaacgaaatgtttgcatagtggctgcacggtctcgctatgcgcgcgcccggtgcagctcgcgggccgatacggtgacggatatgccgtgcgcgcgcagccgcctcgcaagttcctcgctcatgacgacggaacgatgctgcccgcccgtgcatccgatggcgatggtcacgaaatgcttgtcctcgtgagcgtagccttccaacgccacgaggatggcccgctcgtatgcgtccaggaaatcgcccgcgcccggacttgacagcacgtaatcgctgacgggcttgtcttgcccgttgagctctcgtagcgtcggcacccagaatgggttcggcaggaaccgcacgtccgccacgaaatcggcgtccatcggcagcccgtatttgaatccgaagctgaagatgtgcacggccaccgtggacgggccggagccgagcatcgcctcgtatagtttggtcgacagctggtggatgctcagcgaggacgtgtcgatgaccatgtcggcccgttccttgaggttggccagcaggctgcgctcctcaaggatgccgtcgatcagacggtttccacgctgcaggggatggggcctgcgcaccgactcgtaccgcttgatgagcacttcgtcgctggcgtcaaggaacaggatgcgggtgcgcacccccaggtcgtcgagatggctgagcacggctgacaggtcgtcgaaatactcgcgcgaacgcacgtcgatgacggccgcgagcttgtgcacgccgtccttgccggcattggtcatcatgtcgaccagcgggaccagtagtttcggtggcagattgtcgacgacgtaccatcccatgtcctccacgcagtcggcggcatgggagcgaccggcgccggacatgcccgtgatgagcaggacctcgaagtcgtccgcgggctccggcctgttcccgcccgccggcggcacaggcgcgccggccgggctcatggttgcgtgatcgttcattacagtgcctcctcaagggcatgtcgcatcgcgggttccagcacatccatcagggagctgtcggccgtgtccgcgccggtcatgaggatgacctgcaggatggcctgccacagcagcatctcctcgccgccgatcgccagccctcccttggccctccatgcgcggatcaatgcgctggggcgggggtcgtagaccacgtcgagcaggatgccacgcggccggaaggagtcgtcgttcccgatggcttcggcgaccgcgtcggcggcgtggccgggaatcgtgctgatgacgatgtccgcgtcccgcagggtgtcggccgacgcgtcgatcgtcttctcctcgtatgcgatggcgtcgccctcgccgatgatgtctggcagctgccggttcttgcccgggtggcgcgccgccacagtgatgcgtttgttcgtctgcccgttcttcagcatgaccgtgcatgcggcgacggccgaggccgcggtgttgccgttgccgatgacggcggcggaggttgcgctcttccaacggtcaggctccccgagggccttgagctcatggtcgaaggcgagcacgatgcccatgacgtcggtgttgtagaggcggatcgctggcagcgagcccgttgcggaggtgccgtcgggggtggcaccgggggtgatgccaggttcggcgggccagtcgaaaatcgcggtattggcgactttgagacgctgcgcccacatattggacggagtgccatagggctgaatggttttcttgagcggcatggtcaggctcagaccgcgccaggtcggatcaagccctttgagaaatccgtcgagatcgctttcgccgacctcgtgccgctcgtacgcccagtcatccaacccgagcgccttgtatgcggcattgtgcagcaccggcgacaacgaatgggctatcggcttgccaagcacggcgcaacgatgtgcaatcacggtcatacccctccttgctcactgcctatatcattcactgccaccatcgtaccgtaaatgttcttaacaaaatcgtcatagaccaatgaattccgctggcgggatatggacttcgcgccccagcggggacggagtccatggcgccccgctgacggggcggggttcatagaccgccagcgggggcgaacgaggtgtgcggttattcggcgtgaagggcggtgtggatggcttcggctttggcatggcctatgcccttgaccgcttcgagttcctcgacgctggcgtcacgcatcgcacgcactgaaccgaagtggctcagcaggcgcttctggtaggtctcacccacgccgggaatgccatccagcgcggagcgcaacgcgcctttgcgtcgcgtctgacgatgataggtgatggcgaagcggtgcgactcgtcacgcacccgctgcagcaggtacatgccttcggactggcgtttgaggatgatcgggtattcgtcgtccggcacccagacctcttcgagtcgcttcgccagaccgcagacggccacatcgttcacgccgcaatcggccagagccttcgccgcggccatgacctgcggatgtccgccgtcgacgacgaccagattcgggatgtaggcgaaatgatgccggttcgtgttctgctggacgactcccgcgtcccgtatgccgtcaggagacgatgccgtcgtcgtggatgcggatgtatcggacgattcggcacggcgctcgttgtccatgctgtcgccggagtcgccggcgatgttgccgtgtctgaaccgtcgcgtcagcgtctcgtaaagggcgctcagatcgtcgagcgcacccttgccgtcatcaccgcgaatggcgaatctgcggtattcggatttcttggcgatagcgtcctcgaacacgaccatcgaggcgacctggaacgccccgcccacggtgttcgaaatgtcgtagcattctatgcgcagcggtgcctgagcgagcccgagtgccttcgcgacgtcgttcatggccgcggtgcgcgtacccatgtcgctgatgcggctcatcttgctgcgttgcagcgcctgcccggcgttctcgttcgcccggtccatcagcgccttcttctcgccgcggcttgccacgcggatggtgaccacggcgccacgcagcccgctcaaccatgattcgagttctgcacggcgtgccggctcgaccggcacgatgacctcgcgcggcactggggcgattggcgccagcaggtccgcgcgaccggtctgttcctgccgttcgcgtctcgtgcgtgtcgcctgcgcgcgctcgacgctgctcttggccgtcaccgtctgcgtgctgccgatggcgtcgcgtctctccacgatggaggctcccccttcggccgtcgacacgccctcattcccggagagcgaggccatggaagggtccgttccatcatgaggatcgacgttcaatccgttgtcggcggccacgtctgaatacacctgcatgatcaggtcgtcgatgagttcgccgtcggatacgtcctcgacgcgttcgacgctccagttgcgttctccgcgaatcgagccgtcacgcacgatgaaggcgtgcacggacgcctcaagctcgtcggatgccatgccgaacacgtcggcgtccacgtcctgatcgaacacgaccgcgttctgctgcatgacggtctgcagcatctggatttcgtcgcgcagccgcgcggccttctcgaattcgagttcggcgctggcgtccttcatgtcccgcgtcagctgggcgatgtagctcttgccgagccgaccggtcatcacgccgaccagctgctcgcacatgcgccggtgctccttgggcgcgattctcccgatgcatggcgccgagcatttgccaatcgacgcgagcaggcatggtcgcccggtgagttcggccttgtggaacacgctggtcgtgcaggtacgcaccgggaatgtgcgcagcagtttgtccaacgattgtctcagctcccacaccttcgcgtaggggccgaagtagcgggcgtcccttctcttgcggctgcgggtgacccatacgcgaggcacggcctcccccgacgatatcgccagatacgggtaggtcttgtcgtcgcggaactgcacgttgaaacggggatcgaactccttgatccacgtgtattcgagagtgagcgcctccagttcggtgccgacgaccgtccattcgaggctacgtgcggtgagcaccatcgtctgcgtgcgcggatgcagcagatacagcggctggaagtagttggtcaaccggttgcgcaggcttttcgccttgccgacgtagatcacgcgtccttcgccgtcccgccatttgtagactccgggctgggcggggatatctccggtcttcggccggaacaggtcgcgcgtgtcccccagcagcggagccccgttcctgttcactttggcgaccgcatccgaagcgtccgcctccccgcgcagcgaatcggccgcttttctccacacttcgggtgaatgccgctcgatatcgttcgtcacagcatgtccttgaggaacttgcccgtccaggacgcttcgcattgcgccacctgttcgggtgtgccctgcgtgacaatcgtgccgccgccgtcgcctccttccgggcccaaatcgatgatccagtcggcggacttgaccacgtcgagattgtgctcgatgacgatcacggtattgcctttgtctaccagtccctgcagcacgagcagcagtttgcgcacgtcctcgaagtgcaggcccgtggtcggttcgtcgaggatatacactgtcttgccggtggacctgcgctgcagctcggtggcgagcttgacgcgctgcgactctccgccggacagcgtgggcgcgggctgcccgaggcgaatataccccagtccgacctgcacgagcgtgtcgaggtagcgggagatcgacgggtacgccttgaagaacgtggcggcctcctcgatcggcatatcaagcacgtcggcgacggtcttgccgttgtatttgacctccagggtttcgcggttgtaccgcttgccgtggcattcctcgcattcgacgtacacgtcgggcaggaagttcatctcgatcttgagcgtgccgtcgccgtggcacgcctcgcagcggccgcccttgacgttgaacgagaaccgccccgggccgtaaccgcgcacctgcgcctccggcgtcttagcgaacagcgtgcggatcttgtcccacacgccggtgtatgtggccgggttcgagcgcggagtgcgcccgatcgggttctggtcgacgtggatgaccttgtcgcactggtcaaggccctcgacgcgcgtgtgcttgcccggcacgatgcgcgcgccgttgagcttgtcggcgagcaccgggtagaggatcgtgttcaccagggtcgatttgccggagccggagacgccggtgaccacagtcatcacgccaagggggaaatcgacggtgatgttcttcagattgttctcccttgcccccaccacgcgaaggcgcttcgtggcatgcggcttgcgccgcacggccggcacttcgatgctccgtcggccggcgatgtaatcgccggtgacggaccggggcgcctcgatgaggcgcttcgccggaccggagtaaatcacctcgccgccgtgctcgccggcaccggggccgatgtcgaccacccaatccgccctctcgatggtttcctggtcgtgttcgacgacaatcagcgtgttgccgaggtcgcgcagatggtgcagcgtctcgatgagacgcgcgttgtcacgctggtgcagtccgatcgatggctcgtcgagcacgtacatgacgccgaccagtccggagccgatctgcgtggcaagcctgatgcgctgggcctcgccgccggacagcgtcttggccgcgcgcgacagcgtcaggtagttcaggccgacatcgttgaggaatcccagccgggcccggatctccttgaccacttcgccggcgatcgtcgccgccgctccctccagtttcagcccattgatccacgctagcccgcgttcgacgggcatgtcgcatacatcggcgatggattcgccgtctacggtgaccgccaacacttcggggcgcagcctcctgccattgcacgcctggcagggaacctcgcgcatgtacgactcgtagtactgcttcatctggtccgagtcggtctcgtgataccggcgcatcagcgtgcgcacgacaccctcgaatccggtcgaatactcgcgcagccgcccccaccggttgcgatatgagacgttgaccttgaaatcatgcccgtacaggatcgaatgccgcacgtcctcaggcaaatcacgccatggggtgtccatggagaacccgagttcgtcggccaggccctgcagcacatgcccgtagtattcggtcgtggtcttgccgcctccccacggctcgatcacgccgtcggacagcgacttggaatcatcggcgatgaccagatcggggtcgatctccagcttgtagccgatgccatcgcacacagggcaggccccgtatggcgcattgaacgagaacgtgcggggctcgatctcgtccaactgcagctgatgcccgttcggacaggccctgtgctccgagaacggctgacgccgattcgggtccttctcgtccaagtccacgaaatcggcgacgatgacacccttggacagccgcagcgcggtctcgatcgaatcagtaagccgctgtcggatgccgtcgcggatcatcagacgatccaccacgacctcgatggtgtgctttttctgcttggtgagcttgatgtcgtcggacagctggcgctcctcaccgtcgatcagcgcgcgggcatagccgtcgccgcgcagcagctccaaaagatcggcgaactcccccttgcggccgcgtacaacgggcgcgagaatctggaatctcgtgcgttccgggttcttcagcagcatgtccaccatctgctgaggggtctgcgcgctgaccagctcgccgcattcggggcaatgcggtacgcctgtgcgggcgaacagcagtcgcagatagtcataaatctcggtgatcgtgcccacggtcgaacgcggattgcggtttgtggtcttctggtcgatcgacaccgcagggctcaatccctcgatgaaatccacatccggcttgtccatttgcccgaggaactgacgcgcatacgcggacaacgactccacataccggcgctgcccctccgcgaacagcgtatcgaacgcgagtgatgacttgccggagccggacagtccggtgaacacgaccatcctgttgcgcggcacggcgagatccacgttcttcagattgtgttcacgcgcaccctggatggtgatcttcagatcgttcgggatatgtgagatgtccgccaccaatgaggagtcggtcttgcgcatcggtgccttgcggatctcgcgcgacaggaacgtgtcgctgctcatcacacgttcgatcacgacgtccccgccgcccgatttcgacgtcttgcgtccagtcacaaccccgcctttcctcgcacatcccatcatcaacggtagatcatgctcaacaatacccgacttcaagacaaatgtcgaacatcagttcgatagcgtgtcccatattcaaacacatggaccatacaccgtccgatccgcgacgcccccgaatacgcaaaagccggacggccatcagaccatccggctttgcacggcgaaaccgcatcacggccgttccgcgaccgtcacacgatcatgcacacgccctcacacccgctgctgcagccagccgacgagcagaacaatcacctgagcaagcaggccgagcagcgcgaagaagccaatccacgcaatcgcggtggcggcaccgtccgagtaaccgtagccgtaatatccggaattgccggagaacaggtagatgagccacgcgagcaccctcaggccggcggccgcgaccatggcgacgaacgcggccatcttgaaccactgcggtccgtgctgcacgacgttgagacctatgacccacaccgccaggattgcggtgagcatgagccacggagtcgagccgaagaggaacttgtagccgaatccgctcatgttgttgccggcatcgacaagtctgaggaacgacaggaacgtctcgatgccgatgaacacgaccatgagaatggcggagatcttggtgaccgcgcgcacgttcatcgtgtcgaggaagctcggcccctgcggctggggagcgtagccgggctgctggggataccccggctgctgcgggtacccctgcggatactggtatccggcgggctgctgcggagcctgaggagcctgaggagcaccataaggcgcctgatacgcgggctgctgcggggcttgcggctgctgcgggccgggctgctgcggatatgtcatggctaacttctttctgtgtcagtccaatatgatggtttcaatataccgccatttcatgtccggctgacgaaatactccacatatttgacgggtactcgttgtgcgatgccacaatattcgctgcaagacgacgcacgaatccggcacgcgccgtcatctattcgctgcgcagcgcccagtgcccgtcgcaagccgatttcgtctcgtcgttccatgaccgtgacgatcatcatgttggcgatgctcataccgcccacgatcagcgctatcacgccgatcatcaggcccagcgtcgtcagcgagtcgtccgcggtgtttctcgcctgtgacaggtcagccgacgcggtgacgtacacgccggagccgccgatgttcgccgcgtgggcgaggatacggcgaatcctttcgtcgttgcctgatttcgtgcgcacgcagatcgcactaatccggcgtatcatctcctcctagtccgagtattgcgagaacgcccattcgtcgccgacgatgacagagcctttgccaggcttgtcactccttccggtacgtgcgggatccttgaccaaggtgaatcccttggcgcgacattccctcacatagcacaacgccgcatgtcagccccccccatcaaccgtttaccactcataagcgttttctttccagtaagagatccgttgaacaagccggatgggcgaccatgcccatcttcatactccgatggcggaatacgataccattcattgcatgccgaccatggttcctatacaactttcatcgtatcctcttaataacgtttgagtgttccatgaccagccgccggatgctcactcagctctgaaaaccgcgacaataatggaaacggattggttctcacgcaacctacgtatccgaggaggttcccatgcgcatactgatcgtcgaagatgaccgtgacctcgccgccgcgctggacgacgcgctgcggttcgaagggtatgcgacccgcgtcgcatacaacgggctggaagcggtgcgcatgctcgccgagcaatccatcgacatcgtgctgctcgaccgcgacctgccgatcatgtccggcgacgcggtgatggagacgatcgcctcgaacgacatccccgtgtccgtgctgatgctcaccgcggcagcgcaggtcagggaccgcatcaacggtctcgaactcggcgccgacgactacctgatcaagccgttcgcctatcccgagctactcgcgcgcatacgggcgctgcaacgccgtgccggcaagggcgacttctccggcaccgaattctcacacaacggcatcgtcctcgacacggtccgccacaccgtgacccgtgacggcaagcccgtcaacctgtcgccgaaggaatacggcgtgctgctggagatcatgaaggcggacggcagctacgtcaacgccgaggaactgttcgacaccgtgtgggcgggcgcatcagccaccgacctcacggacgccatcaaaaccaccgtatactcgctgcgacgcaaactcggcgagggcaacggcatcacctccaccagaggaaaggggtaccgtctgtcatgaccgcatcacacgcagcagacgccgcaacagactcagacgcaacctcggaggcggccccggtcaccgacacggccgcggccattgccgccgccaaagacaccgccggcggcaatggccatacacgccgtcgccgccgattcccctggccgtcgacgttccgaggccggctcatcgccaccatatccatcgccgccctggcgatgctggccaccgtcatcatcacgcagaacatcatcgtctcacaggcggcacggcagcagaagaacaacatcgtcatgtgcaccgacaaggacaccggcgaactgatcacggtgtacttcgacaagaaccagaccagctacgacctcgatctggaggatgcgccggacgccgtcggcagctccgccaccgccgtctgctccccgatgctctcggtacaggaggataccgtcgagacctccgacccggagtccaccgtcaccaagatcgaggtgacgcatatcggcaagacggcgagcgccatgaccgactccttcatcacgatgatgcagttcatctccatcggcacgttcatcattttcgccgtgctctcgctcatcgtgtcctggctcgtcggctctcgcctgtccaaacgcgtggccaagatcagcaagcaggtggaggcgttgaagcccggcgatctcgacgctcgcatcgcccccgacggcagcgatgacgagatcggcaagctcatcgaatccatcaacggcatgctcggccgactgcagaacgccacggaagcggagcgtcggttcgtgtcgaacgcctcccacgagctgcgaacacccatcgccgccgtcgcgaccaatctggacgccccactgtcccaaggccgtttcccggccgacgtggagcctgccatcaggcgggcgctcgccgcgaaccgtcgcggcagcgacctcgtgcaggcactgctcacgctctcgcgcatccagagcggcgtcatcgatgccgaggacgtcaccgccctgcagctcgccgatttcatcgacgacgagctggccgaggtggaggagcaggccgataagcgcaacatcctcgtcaccacgcgcgatgtcgcaggcgacgtgcaggtccaggccagcaaatcgctgatggacttggccatcggcaacctgctgcgtaacgccatcatgcacaacatcagctcgggcacactcgacatcgccgcgaggcaggagcactgcgccatcatcgtgaccatcaccaacagcaccgacgaaacgctgccggacgatctgatgaatctgaagcagccgttccaccgcggcgaacactcacgcatcagcgccgagcccggcgtcggcctaggcctgtcgatcgccgacgccgcatgcgaggccatgggcgcgacgctggaattggacaggccggacgagcaatcgttccgcgccaccatcaccatcgcgtcggcatagattgatactgcggcaacggcccgtccagctacttcgcgtactcctcaagcgtctggccggactcatgcatcgccttcgccgcctcggctcccacataccggtaatgccatgattcatacgcgttgccggtcacgtcggtcttccctcgcggatagcgcaggatgaatccgtaccgccacgcgttgtctgcaagccactggtgctcgttgacgctgtccttggtgccggtggccccgctcgcgttgatgtccaccgccaggcccagctcgtgctcgctggtccccggctcggccacccattgcgacgcctgtcttctcgcctcctccttcgacgcgccctcgttctgatacaggaatatcttctcgtccagcagctgccgctgcacggcctccgtacggtacgccgacgtgacctccgggtgaagccccgcggcacgcatgtcatcgaacatgcgctgcagatcgggatagatgcgcgaatccacgctctcgccgttgctgagcctggtcagtttcggtgccggatagtcgtcgggaatcctgttccaccggttgacgacaatcagactccagctcgacggagagtatttcgcctgtgcggcgccgggcgcaaacggtccccggcccgcgaaacgccccaggcagaacagcagcgccagtatggcggcaagcaggacgcccagcacgaccgacacgcgcagcagcgtcctgcggttccttctgttccggcactcggcgaacgtccgaacgcgcccgtctcccgtcatcatccgttccatgcctgtcgctccttcactggtctgccgtcatcgcaacatcaccataaacattaggattcgtaaggtttcccggccatcgaccacggggacgaaacggcttatgatccgcggggatgacaaccccgagacacccctgagtcagtaccctgaccgccagtcggcacgtgttcgctatgatggacggttggacttcaacgaatacggacaacaacagaaagacgagcgggacacatggctattgaggcgcagggacttgagattcagatcggcgcgcgcaccttgctccatcccaccgatttccacgtcgccaaaggcgacaagatcggtctggtcggtcgcaacggtgccggcaaaaccacactcacccgcgtcatcaccggcgacatgctccccaccagcggcaaggtgcgcgtatccggcaagctcggctacctcccccaggacacgcatgccgccgaccaggagcagaccgcgctcgaccgcatgatgagcgcccgcgacatcgcctccatcatcagccgcatccgcaaagccgaaaaagacatgaccaacccggacccggacatcatgaccaaagccatgaaccggtacgacaaagccatgcaggacttcgacaaggccggcggctatgccgcacaatccgaggccatcgccatggccgacagcctcggcctcccccaggacgtcatgcagcgtcccctcggcaccctctccggtggccaacgccgccgcatcgaactcgcccgcatccttttctccgatgccgacaccctcattctcgacgagcccaccaaccacttggacgcagactccatcgaatggctgcgcggattcctcaagaaatacgaaggcggattcctcgtcatctcccactccaccgagctgctcgacgaagtcgtcaacaaggtctggcatctcgacgcgcagaccggccagatcgacatgtactccctcggctggaaagcctacctccaccagcgcgtcgtcgacgaggagcgtcgtcgccgcgaacgcgaggtcgccgagaaaaaagccgaccggctcatgaagcagggcatccgcctgcacgccaaagcctccaaggccgtcgccgcccagaacatgatgcgccgcgccgaacggctcctgtccgagacctccgatgcccagaagcaggacaaggtcgccgacatccgcttccctgaaccggcaccctgcggccgcacccccatcatggccaaggacatctccaaggcatacggctccaacatcgtcttcgccggcgtcaacctcgccgtcgacaaaggctcccgcgtcgtcatcctcggctacaacggcgccggaaaaaccaccaccctgcgcctgctcgcccacatcgaagaccccgacaccggcgtcgtcgaatacggccacggctgcaagatcggctacttcgcccaggagcacgacaccctcgatctcaacgccaccgtgcttgagaacctcacccacgtcgcccctgagctcaacgacactcaggctcgttccatcctcggctccttcctcttctccggcgacgacgccttcaaacccgcccgggttctctccggtggcgaaaagacccgtctcgccctcgccacgctcgtcacctcccgcgccaacgtcctcctcctcgacgagcccaccaacaacctcgaccccgcctcccgcgacgaaatcctcaaggccatcgccaaatacgaaggcgccatcgtcctcgtcacccacgacgagggcgcagtccaggccctgaaccccgaacgcgtcctgctgatgcccgacggggacgaggatctgtggaacgattcatatctcgacctcgttgccgaggagtgatggggtgtcggctgcgttgttcctcagtcgcggtaccctcgtaccgctttcttcggtacgccttgccgacacacgcatcacttcacggcaatccactgaacgaacaccacacatatcgggcctgtccgtacccttttgcgtgcttaagtgcgcgccggaacgacgaccgtgcgcacttaagcacgcaaaccaccggttttgcgttcctatgttcgcgcactcgtcgttccgacgcgcacttaagcacgcaaacgcgacttgacccatgaccttgccaacgttccggcgaatatcaacggcaaaaaacgaatgatgcccggtggttcctgaatctcaggagccaccgggcatcattcgtaagacggccagacgatcaaatcacgccgatcggccgatcgcacgggctgatgtcactcggcgtcgcggtaaccgctcgggttcttggtctgccaattcatcgacgacgcagccatgtcgtcgatgccgagctcggccttccagccgagttcacgctcggccttggaggagtcggcgtagcaggcggcgatgtcgccggggcgacgcggcttgatcgcgaacggaatcgcatggccggcagccttctcgtacgccttgatgacctcaagtaccgagtatccgtgaccggtacccaagttgtaggtgaacacgccggggccctcgaccttgtcgatgacggcgacgtggcccttggccagatcgacaacgtggatgtagtcgcgcacgccggttccgtcgggcgtgtcatagtcgtcaccgaacacctgaacctccttgagctcgccgagtgcaaccttggcgatgtagggggtcaggtttgccggaatgcccttcggatcctcgccgatcaggccggactcgtgggcgccgaccgggttgaagtagcgcagaatgacgacggtccaggagtcgtcggcaacgtgcacgtcgcgcaggatctgctcctcgaagaacttggtcgtgccgtacgggttcgtggtgccgccggtctggctctcctcagtcagcggcagctccttgggcgtgccatagacggtggcggacgacgagaagatgaccttcttgacgtcgtgggcgcgcatggccttgagcagcacgatagtgctgttgaggttgttgtcgtagtattcgatcggcttggcgaccgactcgccgacggacttgagcgaggcgaaatgaatcacccagtcgatgtcgttctcggtgaagatgcggtccatcagcgcctcatcgcggacatcgccctcgtagcgcttgacggtcttgccggtgatctcctcgacgcgatcgagcgccttgggcgacgagttgctgtagttgtccacgcagacaacgtcgtaccccttgttcagcagctcgacatcggtgtgcgtaccgatgtagcccgcgccgcccgttaccagaatggtagtcatgtgttcctccttgaaaaacagctgtggatgactccaacagtcattctaatgctgagtatggaatccgaggccttccatgaagtcccgggtgagttccttgtgcttgaacacggccgtgttgcccaggatgcgctcgcatacgctgccgagttcgtcctgcaccgcggcgtggatggcgtcgcggtcgcgctcgccgttcagtgtcgcggtgagttcgtcccattcgagcgtgaactcgccgacctcttccggcagcggcttgccctcggcgagggcgtcctcgatcaggccaagctggttgatgagacggccgggcaggatgaacagcccctgcgcctcgatcaggccgatgggctcctgcttgaccggccagaactcgggatgcgcatggaagatgccttccggcagttcctcgctgaccgagttgttgcggaagatcaggctcatttcgtagccgcgctcggtgatgatcgcgctgggcgacaccgcggagcgcttgccgtcctcgccttcgcagatgatgtccagctcggggttggagtagttgatccagccttcgcggatcttgtcgcacacctcgatgatcgtgtcgcgcgatttggcgaccacgcgtacggcggtgccgggccagtcgaggatctcgatggtcgcgtccgggtattccggcagcgtcatcgtcgcccaggcggccgccttgtgcatcggcagcagttcgccgccgccctggtaatggtcgtgggcgagcacggagccgccgatgcgcggcagcgcggcgttgcacccgaggaagtatccggggaaccggtcgacgaagtcaagcaggtgcccgaacgtggagcggctcacgtgcatgggcgtgtgctcgtcgttcacgcagatgccgtgctggtagaagtacccgtacggggagaactgccagaaccacggttcgtcgccgagcgtggcggggatggtgcgcagcgtgcgcttgttgcgccccgcgaagccctcgttctcatggcagatcgtgcatgcggggtatccgccggccaccgagttgcccgcggcggccttcttcatgttcttgaattcgggcttggcgaggttgatggtgatgaccaggccgtgggagtcgaagcgcgggttcttgtcgagcacgcctttcttgacatagttgttggcgacgcagtagtcgtagaaccagcgcatggcctccatgccgccatgttcgcgttccactgcctcgaaccggtcctgcacggcggacggcgtgccggagagcatgcccatcacgatgtccgcgtacacgggtccttcgtcggcgtcgaacagccccgccgcgacggccgcggcgcggaaccgcgtcagcaggtcgtctggcagcgtgtcgtcgctggtcgcgccggtgggacggtacgagtcgagcgagaacagctcgaagatgcggttgcgcgtccagtcggcgtcgcgcgggtcgagttcaagccgcttgcgcgcgaagtcgacgagcgcgtcgatgctcgcgtagacggcgtcgagtccgccgcaggcgcagtcgtccttcttctcttccgtggtcatcagcgggcggtcctttccatgacgtcgtcgacgatggcgcgaatctcgtcggccttctgctccatctcctgcacgagcttgatctgggtgcgagcgcgcacgaggttgtgctcggggtacttggtggcgaagtacgtgtcaccggcgaggtagtcggcgaggaagcgcatgccgcattccatcgtcatcatgttgccggcgaatgcgagcagctcggcctccttgtcggtgatgctgtcgcgcaccttgccgacgaagccctccgcgtaggcgcggaacagttcggtgctgaagtggaccttgtcgagatccttctcgtcctcaagtgcggtggacgcgccgaagcggatggaatctccgaagtcgaacagcatggaacccggcatgatggtgtcgaggtcgatgatggcacgggccttgccggtcttcgcgtccatcaggatgttgttgagcttggtgtcgttgtgggtgacgcgcagcggaacggagccgtcggccagcccgtccatgatgcgggagtactggtcttcgtgggcgaggaagaagtcgatctccggcttgcaggtttcggcgcggcccatcttgtcggcttccagcgcagccttgaagtcgcggaagcgactcggcgtgtcgtggaagtgggcgatggtctcggtcagctgggaggcgtcgaagccggccaggaagttctggaactcgccgaacgcggcgccggactcgcggaacacgtcggcgttggggacgaggttgtaggagatggtgccttcgatgaacttgtatatcctccaggcgccgtccacctcctcgttttcgatgtagctcgcgccgtccttggtggggacgatgtcgagcgtctcctggttcttggagcgcaggtaggcggtgacgagttcgatgttgcgcatcaggtgcacggtgtccgggaagatgtccgtgttcatcttctgcaggatgtaccggtgctgatccgtgttgatcaggaaggtgacgttgatgtggccgtcaccgtatgcggtgatgcccttgacgtcgccgtcgatggcgaactgatcgacgatggccgccagtttcggatcaatgtcagtcatgtggaaccctcttttccttgttgtgccgcaggttgccgccggtcttcaccgccacaacgaccccctatctgaagctgctgtgccactgcgacgcagcagctgttggcgcatacgcaccgttatttgttaattatagttacataaatgacaaaccgccattcttcggcgtttatagttcctgaatccccttttctattgctataatataaagactgtggatttgaacatgaccacaccgcagctcgcatgatccgaatcatgagcgctctgacaagaaacgactgaaccaatgacctcgtacgccaacaccatctcgttccccctgcacacgcccggcaggacgacgaaggcaagtcccgccgacgtgcgtcgcaacaaccgttccctggtgttcgggctgctgttcccgaacgggcagctatcccgcgccgacctcgggcggcagaccggactctcgcgcgtggcgatatcgggagtcgccaacagcatgctcgacgaagggctgatctgcgagagcggtttcgacgtcaacgcctccggcaagggcaagcgcggcacgctgctgagcatcgacacgtcgcgtctgcacatcatcagcgtcgacctgtcccaggagcatctggtgcagggagccgtgaccgacctgctgggcacgccacagcagcgcatggaaatggcgctcggaccggataacgacatcaacgcggacatgatcgtgcagctggtcgaccagctgcgcaccgacatcgacgccgacacgatcatcggcatcggcatagcggcgactggtgtcgtcgaggacggtgtcattcgcgaatcgacggtgttgggatggcgggaccttgatctgagaggcatgctggaacgtcgtttcggattccccgtcaccatcagcaacgacgtcgtctgctccatgctcgcggagcgattcttcgggcatggcgacaagagcatgctgttcatcaagatcgaccgtggcatcggtgccgcgacgctgatcgacgatgtgacggtgatcgggcagaaccatgccggaggcgagatcgggcatatctccctcgacccggagtcgggggtgttgtgcccgtgcggcaagcgcgggtgcctggagacgatggtcacatcgccggtgattcgcgagcggattcgccgcgcgtcgacgcccgaggagcagctggacatcatccgatcctgcggcgagcagctcgccgcggcgctcgccatgccaatcggcctgctcgacatcaacgacatatgcgtgtacggcccgccggacatcgtgaacgcggcattcctggaggcgacgcagcgccgtgtggacatggtgtcgtcgtcgaagttccacaagcatacctccgtgcgacggtgccaggtgggttcggatatcgcgctgcgcggatccgccatcgacgtggttcatcattacatcgagaacggtcactgagagaaccaccgaaaggtccttgcgatatgaatcgagggccgctcccccgttcagggagcggccctcgattcatgttctgctcacatccggccgtgcggcccgggtggttttggaaactccgtcgccggtaccggtgtgcctatcaggcctccggcgcggcccacgcggcgcccagcgctccgaccggctggtcgagttgcgcaagcttgatgcgttcgccgagatgcaggcccgtcaggaacgggcaggtgcgctcgcgcacgcgcagttcgtccagggtgacgtcgatgagcggctggccggtcttcgccatgccaccgccgaagataatcatgcgcgggtcataggattgtgcgacgatctgcacggcgtcgacgatggcgtgggtgaccatgacgagtatgcgctgggcgtcaggctcgccgcgacgggcgcactcgatgagatccggcatcggaggcttgccttcgaccggccagtgacggccgaccgacgctccggagcacacggtctcaagacagccgctctgcccgcaggggcacgggaagcggttcgggtcgatcgggatatggccgatctcgccggcggcgccgctgaaaccgtgctggacgacgccgtcgacgacgatgcccgcggcgagtccggtgccgaagttgaggaacacgatggttccttcggggtgggatccgccgaccatacgcgcggcgccgaccgcggccgcattgacgtcgttctcgacgtgcacgggaataccgaggcgcttgcccgcttcggtaccaagctccagcgtatcgatgtcgaggttgacgacgttgtcgacacgaccggtttctggattgacctgtccggggatgccgatgccgaccgtggcgacctgatcgaacagatcaccggccacctcatgggtgatcgatacgacgtcgtcgatgacctgcgcgttgccgcgtcgtgcgggaatgcgcacgtcgttgcgaacattatcctgcggatcgacgagaacggcctcgatcttggtgccgccgatgtcgatgccgacgcggaagcggtcggcaggtgtctgctgtgctgtatcctgcactgtcatgtgttgtgtccttacgtaacagcggatatgcgcggttcgcacatccttgacgaatatgtggggcaaggcatatcgtcatgccttgccccaccgatgggtctgagtgccagggcctccggaggaaggagaaggaaagcatggaagccctgatcctcaagtcttgctgtccgatccatctgtccccgtccgtcccgcatcatgccgcgggacggacggggactgcacagatcagaggttgcgccaagcgatggcgctctggtcgaggtcgaaatgctcgaccgaaccgtcaggcagagccacatccgtggactgcggacggtcggtgttgttgatcacgcagtactggccggcatcggggaacaccgcgacctcgcactcggggttggtggagctgtatgccgtgtacttgtcctcgttgtgggaggcccagaacagggcacgctccagcagacgggcgttcgcggccgagtagggcagaccggagatgtatacgccgcggcccttgccgtactcgttgaccgcgagctgcacctgaccaccgtcggcgcgcagcagcgtcacgtcctcgttgaccgggaacgtgttcgcgaccggctcgccgaagtcgatgccgccaagcggcttgatgccctggccaccgccgcagcccgacagcgggatgcggtatccggccttctcccacgcttcgcgggcggcgggatcgacatgcacgtcggcggtgatgaagtgctccggcgtgacggttgggaagtacttgtccaccgacagcgtctggtagcgttcctcgtccacgcccagcacgtcggccagctggaagaaacgaccagcctggaaacgggccagcgaactgggctctccgacgccgacgaatgctccgccgccgcgcacccaggcgcgcagggtctcggtcagcttcgggttcttccacacgtctccaccggtgaacgcggtgtcgaccgggccaccgttgatgatcacgtcgatgtcgtcggcgacgccatgctccagcacgtcatcgaagctgatgaaccgcacgttcacgcgcatgcccgacagcgactccagaatgccgtaatacgaatacgtctgcttgttcggcagcgcgtgggcgaccgtgaacgccatccacgaacgcatcttgccccacgagttcagaatcgccacgttgagctcgccttcggcggcgactccaccggtacggtcatggatgtcgcggaactcgtcggcgatgtgggtgacggtatcgacgaacttcgggaacttcgcggccagcgacaggtatccgccgtagcccatgcgggcgatcggggaacgcaggatggcacgacgggccttgcgccagttgtcccatgcctcgatgctcgggtcgttgccctcgtagaacgtgtcggggaagaaatacggcaggaaacgaccctccgtgtacttcacgcccgggatgtccgcgatcatgcgggtcgtggtgccgtcaccgatcgaaccgacgacagcatccaggcccagatcctcgaaaccatccttgtacggctcggtaccgatccactggtcacccaggaacatcatcgcttccttgccggcctcgtgcgacatgtcggcgagcttcttgacattggtgcgaacgaaaccggagaggaagtcgatccagtcgcgttgggccttgcgcggcacgcgccacgcggagttataggcgccgccatctacgaagtcttcggggcgcaggcggtagccgtactccttctcgaagtcgtcgagcgcggccgggctcacggtgcaggcgcagccgaaccagtccacgaccttctcgcgctgcttctggtcgaacagcagcgtgaactggtagaagaacgtcgtgaaacgcacgacatccacctgcgggttgtccttgagccactgctcgaacgtgtcgaacacgaacttgcgcgtcgccgggtggtagatatcgaacggaatctcgtgctccttgtcgccccacccgttcgtcaggtggttgtacatctcgaccggatcccagatgatgtacgcgaggaacgagaccgtgtactcgtgcatcggcgtcgcgccggagacatgcacggtatcggtgtcctcatcaagcgtccacagggaggcatccacgacctcattggtggtgcggtccacgacttcccagtacttgtgcgggtcggcgtcacggttcggcttgagctgctcctcgaagaagccgtccatcaggggaacatccacgatgtccgcttccgccaggacgcgcccggtgagcaggtacacctgcggggtctcgtccatgtgcagcgtgatccactcgttgtgtgcacgggtcgggaagtaggcgctgtagatcttcttgccgagtgcgagcacggactcgtcaaggtgtgtgccatcggaattacggatggcatcagcgccccacaattcggcaagttccttggttttttcagcgaagttctcttcactgggcaatgtgaagcggccagtgctggtcatgggttctccttcttgggaacagtcatcggggaaagatatatgggtgatgaaatcacgaaggccgatgaaatggccggcatcatcgcaggcccgctggatcctgactgcgcaaatccttgacgcctacgatgacgctggacgatggtaatcgtgtcactgatcgaggtgatggccgtaccgcccggcactcagtgacacatcatgccgggcggcggttcgtggttttctcccgcacatggcgggagaaaacatcagcccttgacggcgccggcggccaggccggactgccagtagcgctggagaccgaggaagatcacgatcaccggcagcacgccgagcagtgcgcccatcatcagggcgccgcgatcggtgaatgtggccaacgacaccatgccgtacagacccagggtcaccggcttgagggcgtcggaggacaccatcatcaacggcagcaggaagttgttccacgtggcgacgaacaggaacaggaagatcgtcaccattgccggggcgagaagtcgcagcacgatggtgaagaaaatcctggcttcgctcgcgccgtcgatgcgggcggcttcaagcagttcatcaggcacagagctctgggcgtacgtacggcccaggaagaagccgaacggcgagacacagcacgggatgatgatggacgccatcgtgttggtcagcttcagagcgtggaagatcgagtactgggggatggtgagcagggcggcaggcatcagcatgcaggccatgatgatgccgatggcgacgttcttgccgcggaagttgaacttcgcggtggcgtagccggccatgacggacacgatggtgccgatgagtgcggagacgcccgagtagatcagcgagttcagcacccagcgccagaagttgccacgggtccagccgagcagcttggagtagttggtggccacggcgttggggatctggtcgagcgacacggagaaccacaggccattgccgctggtcatctgggagggcgtcttggtggacgcaatgatggcccagtaaatcgggaacaggaagtagatcagcgccaacaccagtacgatgaccgtaagtgtcttgactgcaggcgacggcctcatggaacggggcagatcgtgctgtgcagcctcgcgctgcttctccaaacgacgttcgcgcttcttgttcgcgcgcgcttcagcggttgcagagctcattactcgttcaccttcctttcagcaagggtgtacacgacggcaagcagacctgcgatcagtgccatgacgatggcgatggctgatgcggggccgtcacctgacggggtaagcgttccctgcgaagtattcatggccatcatcatcggcgtgtacgccttggagatgcccggatccgcggtggacatgatctgcggctcgttgaacagctggatggtgccgacgatggacagcagcatggcgagcagcgccgcgccacgcacgttcggcagcttgatcttcatggcgacctggaagccgttggcaccatcgatgcgggcggcctcatacaggtcgtgcgggatggcctgcagcgcggcgaggaagatcagcatgttgtaaccggtgaacgtccaggtcgtgatgttggccatggaaccgaggacaacgttgttggcaaagaagtcgacatggatgccgatggactccagacccttgacgattggggaaatctgaccgttgtacaggtagacccagatgatggaggcgacgacgccggggatggcgtagggcaggaagtagcccagacggaaaccggtaacgtgcttgacgacaaacgaatcgatgaccatagccagcgcaagggcggcgatgatcatgatcggcacctggatgacggtgtagagcagcacatggccgataccagtccagaatttgccggaagtgatgacgtattggaagttctggaatccgacgaactcgttgaccagttcgccgccgccatagaggccgccgccttggctgacctgacggaagaagctggaatagacggcccagatgatgggcaggaggaacacgaaggcgaacaagattgcgaacggcgccatgaacgcccagccggttcggttctcgcgcttgaatgccttcgagcgctttggctttgcggcggcgcgtttcggcgcggcacccttggcctgagtaatggatgcagtcataatacaaacctgtcttttcgaaaaacagaaaaacgattccacgagcatgtactcttggacatatgaaaggccggagtccgaatccccggcctttcattttatgatgcctgaggcatcgggggtcttgggtgatggacggaacttttcagcttatccatcaccggaccgggttatgttcactccttgacagggagcttggcgttcttcagcgcttcgacggaagtcgtctgagcggtgtcgaagatgtcggagaccttggcgtcaccagtggcggccttggcagcagtctcgttcatcgctgaacccacggcggagaagcccgggatgtagctgaacgaagccatgttgtcgttcgctttcttgaactcagccatgatgtcctggttgctgaagaactcggaccacgcagccggagtcttggcagcctcagtggtggcggccacgaccagaccctgggagaccagatccggaacctgggtgttgaaccagtcgaggaacttcatggcctcggccgggtgcttcgagcccttgagcacagccacgccggaaccaccgtcggagccggtcttggtgccgttgccgaaccaatcgggcagctgggcgaccttccactcccccttgccggtgccaccggcggagctgatgaacagcggggcttcccaagcggcagccacagtgccgatcagctgacccttgttaatggaggcgtcgaaggacggatcccaacgcgggttggtgagcgcggacttgtcgtcgagcagctgctggtacaccttggccacggccttggagcctgcagtctgggtgtcgaccttccaggcattaccctcagtcttgtaccactcgccggaagcgccggaagtgccggacatcgtcatcatgccctcatcgggctggaacgtcatgatgtacttaccctgggcggcggtcttcttggcggtcgcgataagctcgtcagcggtcttcggcacggtgatgccgagcttctcgaactccttggcgttgtagaagtacgtcagggggccggtgtcctgcggcagaccgtaggccttgccaccgatctgcatcatggagaacggaccctcagcgaagtggtccttgtacttcgcggcctcttcggtgacgtcctgcaacaggccctgattgaagacctcaggcaactcggcgtatccgacctgagccagatcaggagcggcgccggccttgacatcggtcgccagcttcttgatcatgtcctgagccgcaccatcgaacttggtggccttgacctggatgttcgggttgtccttgttccacttggccacgatgtcattgaccagcgtcatgccctctttatccggcaggcgatgcatgtaggtgatcgtcaccttttcgtctttgggggtattgctgctgttgttcgcggatggaccgcaaccggcaagggcgatgcccatgacagtcagcgacgccagaccagcaagcagtcgtttcttagctaccatattcctaactcctccattgagatggatgttgcctcctcgtcgtggcaactaattagttagtgtaaaggcatgccaaggaaatgtcaactacattaacatttgtgtcgtgtcaccggtcacacagatggtaacccacggcgtgcaacaccgcccgccagtaagcatgacagatttatgtatataaagtttacaatttatttttctctcttctagtcgtcaaggccatccctatcgacaacaacggagtctccccgcgaaaaaccttacggaacaccggcctatacggcgtgtcgtacattccttcgacgctcgaatcaagctcatcctcataatgtgacactcctcacattaccagagtcattctggtcacgcagccatcttcatcctgctcacgcgccgaccgcaatgccgggcacgatacggaaaacgccccggcgtgtcatcaaggacacgccggggcggggcgcaaaggcgatcggtaccgcggggcgtctactcgacgctacgcagctgcgctgctatctggatggcctcgacactggcttcggccttgcttcgcgtctcctgccattcggtggcgggcaccgaatcgagcacgagaccggcaccggcctgcacgctggcctgatgatcgcgcaggaaggcggtgcggatggcgatggccatgtccatattgccggagaagtcgaaatagccgactgtcccgccgtagatgcctcggtcggccgcctccagctcgtcgatgatctcgatcgcgcggggcttgggagctccggacagcgtgcccgccgggaacgccgacatgaacacgtcgaacgtggtcaggttcggatcgaccgtgccagtaaccgtcgagcagatgtgcatgatgtggctgaaacgcttgatgtccatcagctgcacgacctcgacgctgctgggcaggcagaccttgctcaagtcgttgcgcgacaggtcgacgagcatgatgtgctcgctgcgctcctttggatcggcgagcaattccttggcaaggcgctcatcctcttccggagtggcgccgcgcggacgggaaccggcgatcgggaaggtcatcgcatgcccgttgtcgaccttgatcagcgtctcggggctggaaccgatcacgttgaaatcgcgtccctcggcgtcggtgagcgtcatgaaatacatgtacggactggggttgagcgtgcgcagcacacggtacacgtcgaacgggtcagctggcgaatccagatccagacgctgggatatcaccgtctggaacacatcgccgtcgacgatgtgccgcttcgtctcctccacccagcgctcatactcggccttggcggtgcggaaccgcagctggggctggggcatgcttcggtcaagcacgctcacgcgggcctcccccgccaccggcgtggcggccttgcgctgcatggcatccagccgttcgatggcctcgtcatacgcggcatcggcgcgggtcggccggtcgtcgacgttcaccgcattggctatcagccacaccgagccggacacatgatcgaccactgcgatgtcggtggccaaggccagcgtcacctccggctggccggtctcatccggcgcctcggcgcgcagtttgggctcccaatggcggatggcatcccagccgacggagccgaccagtccgctggtcaggttcggcagtccggccacgtgcggcgccttgagcaccttgagcgcggcatgggccacctcaatcacgtcaccctcagtgggcactccggccggcacctggccgagccagttcgccttgccgtgatcggagcgcagttgagccatcgaattgacgccgatgaagctgtatcggctccaggaaccaccgtattccgccgattccagaatgaacgttcccgaacggcccccggcgagacgctcgtaaaagcccacgggcgtcaacgaatcggcgagcagtcgccgcacgatgggaaccacacggtatccggcgtcggcaagccgatggaactgggcgcggtccggccatgtgccgccccattcgagaggctcgacgctgcacgcggccccatcatcgtgcaggccgccggccacaccggcatcgtcaatacgccgctcgctcatcacgcattctcctgttccgcggtacggtttccgacgacgaccggcaacgggccgccctcctcgaagcacgagcgcttgccggtatggcaggcggcacccacctggtcgacctgaaccagaatcgcatcgccgtcacaatccagcgccagggacttcacatactgcacatggccggacgtgtcccccttgcgccagtattcctgacgggagcgagaccagaacgtcacgcgaccggtcgtcaacgtgcgccgcagcgcctcgtcgttcatgtagccgaccatcagcacctcgtgcgtgtcatactgctggatgaccgcggcgaccagcccgcgcgcgtcacgcttgagccgcgcagcgatgcgcgggtcgagttcgtcggtgttgtcatagtcgatggtggattgcgtatctgtcatgtccttcatattcctgttcatgtccctatggagtcgtgttcatgcatgcggcgaatcatcgccggccggttccgccgcgattcataggcgaaccgtgtatcccgcggaccgaagcgcctgcttgacctcgcggatggtcaccagaccgtaatggaagatcgacgcggcgagcaccgcatccgcaccggcggcgatggccgggggaaaatcagcggccttgcccgcgccaccggaggcgatgatcggtatcttgacctcgcggcgcactgccttgatcatctccaaatcgaagccctcacgggtgccgtccgcgtccatcgagttgagcaggatctcgccagcgcccagttcctcggcccgcttgacccaccagatcgcgtcgatgccggtggactttcgcccacccatcgtggtcacctcgaacccggactgcgtatgctgttcgccctgctcgcggcgggcatcgaccgacagcaccagcacctgattgccgaatcggtcggcgacgcggctgatcagcgtcgggtcgttgatggctgcggtgttgacgcccaccttgtcggcgccgcaacgcagcagcgagtcgacgtcctcgggagtacgcacgcctccgccgacggtcatcgggatgaacacctgctctgcggtgtggctgaccacgtcgatcatggtctggcggtgcgagctggaggcggtcacgtccaaaaaggtcagctcgtcggcaccctgacggtagtactcccccgccagctcgaccgggtcgccggcatcacgcaggttctcgaaatgcacgcccttgaccactcgtcccgcatcgacatctaggcatggaatgactcggacggccaacgacatgattgctcccttatcaagctcggttgttgtacggataccaagggtagcgtccgcccgttacagcagtgccgcggcgttccgctacatgggacgggaaggccgcgccctctgcggttcgagattcgcggcctgcagcagtgagagcgcggttaggccgcgaaggcctctttggtcttggcggcgagctggccgcaggcgccgtcgatatcggagcctcgggtgtcacgcagggtggccgtgattccggcatggtgcaggatatcgaggaactgctgctcatcctcgggcttggatgcggtccagcgagatccctcgatcgggttgagcgggattgggttaacatgcgcccaatcgtcgccgtaatggttgagccgcttggccagcagtcgcgcgtgctcggcctggtcgttgatgccgcgcatcaacgcgtattcgatgctgacgcggcgcttggacgacaggaagtaatcgtgggcggcgtcgagcacctgagtggtgttgaaacgcttgttcatcggcacgagctcgtcgcgaagcgcatcactgggcgcgtgcagcgacacggccagacgcaccgggatgccctcggccgtgagcttcctgatgccgggcacgacgccgacggtcgatacggtgatgttacgcgcggagatgccgaacccttcgggaggcatcgcgctgatctggcgcacggcggatagcacggaccggtagttgcccatcggctcgcccatgcccatgaacacgatgttgctgagccggccggggcctccggccacttcgccgtcgcgcatcatacgagcggcgacgcgcacctgttccagaatctcgccggtcgacatgttgcgggtgagtccaagcttaccggtcgcgcagaacggacagcccatgccgcagccgacctggctggagatgcataacgtggtgcggttcgggtaacgcatgagtacggattcgatgtgagagccatcgaaaaggcgccacagcgtcttgatggtggtgccctgatcggccacctgatgggtcacctcgtcgatcagaggcgggaagaacgcctcgacgatatcgccgcgtgtggcggcaggcaggtcggtgaacgcctcggactcggtctccagccggccgaagtaatggttcgccagctgcttgacacggaacttcggcaatcccagatccttcgccctggcgatgcgctcgtcaggcgtcatgtccaccagatgcaccggcggcttgccccgtcgggcatggtccttggacagcacgtcgcggaaagcccccttgtcgccgggggtgattccggtctccggctgttccgcatcctgcgcatgcccggtcgtcattgctcctccatcatcgttcgtatcttgtcgtcgcttcccgcatcgtcatgtccgatcgtcgagacgaccgtcacatgccgacaatccacagcagtccggccaggaacggcgcgcacatgaggatggaatccacacgatccatcacgcctccatgacccttgagcaggtgtcccatatccttgatgccgatatcgcgcttgagcatggacgcgcacaggtcgccgaacgtgcctgcgacgccggtcagtactcccatgacgatcggaacccaccagcgcgacgcccacaccgcgccgtcatacgtgcagaagaacaccgcgaacgcgccgatcatcgcgaacaggatcgaaccgaacagtccctcgaccgatttcttgggggagatgcgcggcgacagcttgtgcttgccgaaccatgcgccgaagaacaggccgccggtatcgctcagggccggcaggaacaccagcgtgatcgcgtgcgcgaccggatgcccgttgaacaccagcgacagcacgatgcagctggccagcgtagggatgtacagcacggtgagtatcgagacagcgacatgcgacagccgactgtgatgcagttcgcctttctcatgattgaacgacgactgctcgcgcgcggcggcgtcggagctcgacagcttggatgcgacggcgagcgaaagccagttgccgaagctgaaccgggcggtggcgagaatggccaccagcatcagcgtcgccatcgtcagcagcgccatcgtgccgaaatggtacgggctgtaataggtgccgagcaggatggccgccgaacacagccacagcgcgacgaccgggatatgcagaccgaccgtggcgaaatcgacacggagctcccacagcgcaagcaccatgaacacgacgatcagcagcacgaacacgtcgatgcggatcagcaggctcgccaatatgatgatgacgagcaccgcgccggtcgcgaccgcctgcggcatgttgcgcccggtcttcttgttgatgttcgccagggcctcctcggcctccacatgaagctggtcgttgtgttccatgatgttcaaccgcctccgtaagtcgatggtgccatgatgattctgccttcatcatagcgaaccggacgaggcgatggtcacatgccgcgtccggttcaacgatttcgtcatgaaggtcagacctccatgatctccttctgcttggtctcgaacagcgcgtcgagctggtcggtgacctgcttggtgaccttgtcgagctccttgagcagacgatcgccctcgtcctcgcccatctcgccgtccttgacggacttgtcgatggtctccttggccttgcggcggatgttgcgcacggcgaccttgccgtcctcggccttcgacttggcgagcttgacgtattccttgcgacgctcgctggtcagctccggcatggtgatgcggatgacgttgccatcgcggttcgggttgacgccgagatcggagtcgcgcagggccttctcgaccttgctggcctgggacacgtcgaacggggtgacggaaagggtgcggggctccggcacgccgatggacgcgacggccttcagtggagtcggagcaccgtagtagtcaacgacgatgccattgagcagcgcggggttggcgcggccagtgcggatgcccgcgaagttctccttggtgttctctacggacttgttcatctgttccttggcttgttcgacaggattggccattttgtgctccttgttgttgttcttcgttgaagttggtttcccgggttggatgcagacgcgcgatcaccgatgcgcgtcgctcacgcgagcgtggattcggcggtggacaccagcgtgccgatctcctcgccgagcagcgcgcgggtcacgttgccggcctcttcgagaccgaacacgcggatgcgcttcctgttgtcgcgggccatggacaacgcggcggcatccatgaccgccaggttgtcgacaagggcgcggttgtagctcagcgttgcgaaacgcttggcatctgcgtccttgcgggggtcggaggtgtagacgccgtcgacgccgttcttgcccatgacgacctcatcgcaatgaatctccagcgaacgctggatggacaccgtatcggtggagaaatacggcatgcccgcaccggcgccgaagatcacgacgcggcccttctccaagtggcggatggccttgagcggaatgtacggctcggcgacctgacccatggtgatggccgtctgcacgcgggtggcctgcccctcctgctccaggaaatcctgcagcgcgaggcagttcatcaccgtgcccagcatgcccatgtaatcgccgcgggaacggtcgatgccggcctgctgcaattccgcgccgcggaagaagttgcctccgccgacgacgatggcgacctgaacgccctgccgcacggcggggacgatctcctcggcgatgcgacgaatcacctgcgtatcgatgccgacctttccgccgccgaacgcctcaccagacagtttcagcaatacccttcgtggctgatccgccgctactccatctgccatgcatagcctttctgatatcggttccctgatgcttcgtgagccggaaccgcccgacatactgcctatcagcgtatccgcaaactgcgacagtgcccggtagcgactcgcgcgatcacagcgattcggcgaattcctcgacccgggccaccacgtcgtcgagatacgacgcagaagtgcgccaccggccgggaacctctatcgaatgattggcctgcgggtactcatgcacgaggccactgagacgatgggcccggtcgctgcggtacagcgggtccgcggttcctgcgcagatcagcggttcgggagccgagccgggctcgtaatcgtcatcgcccggcacggggatgacggaccgtgtcggatcgaagtcggccggcgacagcacgggcgtcagcaaggccatcgggacgccgagccgggacacatgcgggtagatgaacgtcgacagcgatttcgccaccaccagggtgcgcggctgcgatgccggactcgaccggcgagggatgccatccagccagtcgtcgacggctccggacagcatcgagaatattctcggcgcgggggtcttcgacaggtccgcatcgacgtcgagccgttccacgaaccagccggcatcggccaacgccatcgcgcagtaatacagcagcggccgatcgcagttgtatccggtgcccggcatgatcagcgcatgccggtcggtcctatccgatgccatgcggttcttcggccattcgtttctgcggcaggtgggctgcgccgttccgctccccatcaacgatgaaatcatcgtcatgatcccccatatgatttttcgttattcgtgtgattgcatgctgtcggctggcatggccgcgccggccatgccaggtatgacaaaggcggccgacgcatgaaagcgcggaccgcctttgttgaggttcatctcagctcacaggctgttccccggcccgatgatgcggaccggagcgggacgaatcaaaccttcgcggttcgattcactcctcttcgcccttgccgacctcgatacgggcgaaggccacggccttgccaccgacttcctcgaacagcttgccgacggtcttggacggatccttgacgaacggctgctcaagcaggacgacttccttgtagaaggcgttgagacggccttcgacgatcttcggaacgatcttctcgggcttgccttcggccagggacttctcggtggcgacgcgacgctcggactcgacgacatcggccggaacgtcctcacggctgagccacttggcgcccatggcggaaatctgcagagcggcctcgtgagcgaccttggcaccggcttcgtcggtggcgatcatcgcgacgatgctcgggggcatctcgacggacttcttgtgcgcgtagatctcgacgtgcgggccggagatcttggcgaactggccgaccttgacgtgctcgccgaacagggcggccgcctcttcgacggcgaccttgacggtgccgtcctcggcgttggacgccaggagctcgtcggcgttgttcgcgtcggcggccacggcgtagccgagcacggtgtcggcgaattcgacgaacttcggggtcttggccacgaagtcggtctcggaattgagctcgacggcgtaaccggtctggccttcggcggactcgatcaccttggaggcgatggtgccttcctgggccttgcggccttcgcgcttgccagcggcctggatgcccttggcgcggatgatctccttggcgcgggcgacatcaccctcggcctcggtgagagccttcttgacgtccatcatgccggcgccggtgtcttcgcgcacctgcttgatcaaagctgcagtgattgctgccattgatttgtctcctcgttaaaaatgcgtccccatagtgatgggaggctgttgcacctcccatactacaggaggtaggtcactcggccttggcttcctcggcctcggcggccggagcggcttcagcggaagcgccctcggtcagcagttccttctcccaagcggccatcggctgctcggcttcggtctcgccctcggccttggcggcccggccggaacgctccagcaggccatcggccactgcgtcggccatcaggctggtcagcagctcgatgccgcggatggcgtcatcgttggccggaatcgggtagtcgacggactccgggtcggtgttggtgtcgacgagggccacgaccgggatgcccagcttgtgggcttcctcgacggcgagcgattccttgttgatgtccacgacgaacatcgcggagggggtgcggaccatgttgcggataccgccaagctgcttctccagcttatccttctcgcgctccagcagcagcagttccttcttggtcagaccggagccgtgcacgtcggagaagtccatctcctcaagttccttcagacggctcacacgcttggagacggtctggaagttggtcagcatgccgccgagccaacgctcggacacgtagggcatgttcacgcgcgtggcctgggtctgcacggcttcctgggcctgcttcttggtgccgacgaacagcacggtgccgttgtgggcgacggtggccttgatgaagtcataggccttgtcgatcagctccagcgacttgaacaggttgatgatgtggatgccgttgcgctccatcaagatgtactgcttcatcttggggttccaacgacgggtctggtgaccgaagtggacgccggccttgagcatttcgctcatcgtgatctgtgccatagcactacctttcttgtcggttcttgcctggtcatgcgtacctgagtgcagccccgccgaagcgtggccgaccgacacaggccgtcgcggacatgacgcgatatggtgtgcaccggttgacgataacggttggccgtcgccacctgcgactgcggtgacggccgggttggcgcacaaatattcagaataccaccacgtgcctacttggcggcgtgctcacgcatgtaccgcaacgcctcgcggcgctccgtcttctccagccggtcgaggtacacgtgaccgtcgaggtgatcggtctcatgctgcagcatgcgacccatcaggccgctgccctccagcacgacctcgttgccgtccaggtcgatgccgcgcacgcgggcgtaatcggcacgacgggtcttgtaccacaggccgggaacggacaggcatccttcgtcaccgtactgttcgccgctcttctcctccagcaccgggttgagcacgtacccgatcttcccgttgatgttgtacgagaaggcgcgcagcccgacaccgatctggttcgccgagagcccggcacgacccggatcgtcgacggtgtccagcagatcctgcacaaggcggcgtacggagggcgtgatctccctgatcgtctcgcacggggtgcgcagcaccggatcgggaactgttctgatttcgcggatggccaattacttctcctcactggtgtcgttgctgtcggatgccgcgtcgcccacgctgtcctcctgctcggggctgccggattcggcttcgtcgtccttcatgaagcgaatcttccccttcgcctggtcgaaggcctgcttgacgctttccgaagactgcttcacggtctcggcggtcatgtcgaggatcttgacggtggcgggcagcggctttgcggcgttcttcggagcatagatcatgttgtcgatcacgtcggcgtaacgctgcagcaccttcgggcggaccaccttcatgctgggtgtcagagtgccgtcctcctggttgaactcctcgtccagaataacgaacttgcgcaccgactcggcgcgggagacgttgccgttggccttgtcgatgtactgctgcaccaacgctcggaccgcgtcgttggtcgcgatctcgctcatcggcgcgtcgatgtcgaggttctgcgaggcaagccacgatcgggtcatctccgcgtcgagttcgatgagcgcggcgatgaacgggcgtccgtcgccgatgacgacggcatgggcgacgatcgggcatgtgttgatgacatcctccatcggcgccgggctgatgttcttgccgccggccgtgatgatgatgtccttcttgcggcccgtgatgaacacgaatccccgatcgtcgatcgtggcgaggtcacccgtgtgcagccagccatcggaggtcagggcctcggcggtccgctgaggctgcttgtagtagccaaggaacacgttcggccccttgatcatcagctcgtcgtcatccgcgagcctgatggagatgcagccgggccggccgacggagccgacctcgttcgcgtcctggaaattcaccaggcagggcgcggccgtctcggtcatgccatacccctggatgaaggtgatgccatcgaatccgttgaagaagtgcgcgagatcggcattgagcggggcgccgccgcaggcgagccacttcatgttggggcccagggcggaacggatcgacgagcccacggtctgcatgtagaagctgtgctggatgcgggcgcccagggaatgatggccgccggccatctcgtccttcgaccactgcacgaaatgatcgaacgccttggcgaacaggcgccccttgagaccggctccggccttctgcgaggcggcgttgtacaccttctcgaacacgcggggcacgcccagcagatacgtgggcttgaagccgcgcaggtcggcgagcagccgcttggcgctggggatatagccgaccacgccatgcgagccgatggccacgtactggatgtaccgcgcgaagcagtgcgccagcggaaggaacagcagcagacggctcggctggtacagcatgtcgttgagtacctcatagccgttgtagaccgtgtggttgaagttgcggtgagacagcatcacgcccttcggtttgccggtggagcccgacgtgtacacgatggtgaacaggtcgtcggcgcggacgcggccgatcgccttgtccagttcctcgtcgctgacggactcgccgaaatcggcgaccgcgtcgaggccgttcgccttgaagttgaacacgtagcgcaggctctcgctgtgcgcgcgaatctgctcaaggatctgcgcatgggagtcgtcgccggcgaaggcgatgaccggttcgacctctgcgacgatatcacccgtctgtttgggcgaatcggtctcgtatacggggacgctcaccgcgccgatggaggcgcaggcgaagtccacgacgccccactcatagcaggtggcggcgtatatcacgaccatgctgccgggcttgaccccgaggccgagaagccccttggccacctcacggacgcggtcgttcatctggccggcggacacgtcatgccactgcctcgtctcatcgtcctgccattgggcgacgaggtcatcggggtcgcgttcgcaacgcttggcgagcagtgaatagatggtgtccaggtctgtggtctgatagatcgtatcgacggtgtattcacgcaacataggctccactataagcatggccgcgtaccggcacgcggccatgcggaacatatcatccggcttgcgcggcgtgtatcacccgatgtccgtcatcgtgcacagccagcggcatcccatctggcgcagcacgatgttcgaccagtagttctgcacgccgatggtcagatgcgtcgatatctcgaacgtcgtcggattgatgaacatccccgacatcatccggggcaccaccggcagataccggagtttggccttcagctcgggattcgactgcatgtggttgtcgagcaggtacgccatggtctccagcttcttgagacacgggccggtcaccgcccgtctgagcttgcccgcatgcagctgtccgcgcatgatgtcggcggacatgcatgctatgcgggcggacgataccgccagcgaatggccctgtgcggcgttgatgcttcccgcgccgcagctggtgatgtgatacggcaccggaacgtcggacgattctacgatgacgtacccgtcgaggctcggcaccgggcagggcgggttttcgcgcgcgtaatgataagtgggttgctccatgtctgtttctccgtcttctctctcgcccccatccacgatgaaaggggataatcccagcacaacacaacaaaggcacccccgcaatggacgagggtgcctttttgtgcaatcgtgccgcgattcgagcctccgacgcggaggcgaagcatcacggatcagacgtggtaggggttgacgaccaccgagcaacgctggaagctcttgacgtcgacatagcccgtggacgccatggctcggcgcagcgcgccgatgtagttcacctggccatcagcgcggtggctgggcccgaacaggatctgctccagcgagccgaccgtgccgacatcggtgcgggaaccgcgtggcagggtctggtgacgggcttccgcaccccaatgcttgccgccaccgggagcctcggtggcgcgggcgagcggagcgccgagcatgacggcgtcggcgcccatggcgagggccttgacgaagctgcccgaatcccccatgccgccatcggcgatgacctgcacatagcggccgccggactcgtccatgtaatcgcggcgcgcctcagccacgtcggcgatcgcggtcgccatcggggcgtggacgccgatcgtcgtgcgcgtagcggtgaccgcaccgccgccgaagccgaccaacacgcccgccgcaccagtgcgcatcaggtgcagggccgccgtgtagttcgcggcgccgccgacgatgaccggaacatcgaggtcgtagatgaacttcttgaggttcagcggctcatggccgagggacacatgctcggcggacaccaccgtgccgcggatgacgaacaggtcgacgccggcttcgaccaccgtggagtagaactgctgggtgcgctgcggggaaagcgcgcccgccacggtgacgcccgcatcgcggatctcatgcaaccggcgggtgatgagctcgggcttcaccggctcacggtagatctcctggatccgctcggtcgcgacgtcatcgggcagctgggcaatctcgtcgagcagcggctgcggatcgtcataccgcgtccacagaccctccagatccagcacgccaagagcgcccagccggcccatcgctatcgccgtggcggggctggtgaccgaatccatcggggctccgatgaccggtacgtcgaactcataggcatccacctgccacgacgtcgacacgtcctgcgaatcgcgggtgcgacgagagggaacgatggagacatcatccagcgcgtaggccatgcgggccttcttgcccaaaccgatttcaatttcctgagacatggtttcaaggctaatgccgggctgtgacaccggacgcggccgcacacgcgcatcacccgccgtctcacattgtggcgaataccgagcggcggacaacgcgcggtaacatcgatgcgctaagactggtgcacatacgccaatcacgctaggaggaaacgcatggccaaaatcaaggtcgagggaaaggtcgtcgagctcgacggcgacgagatgacccgcgtcatctggaaggacatcaaggaccgtctgatcctgccctatctggacgtcgatctggactattacgacctgggcatcgagaaccgtgacgccaccgacgaccaagtcaccatcgacgcggcaaaggcaatccagcgcgagcacgtgggcgtcaagtgcgccaccatcactccggacgaggcccgcgtcaaggaattcggtctcaagaagatgtggaagtcccccaacggcacaatccgtaacatcctcggcggcacgatcttccgcgagcccatcgtgatgagcaacgtgcctcgtctggtgcccggctggaccaagccgatcgtcgtggcccgccacgccttcggcgaccagtacaaggccaccgacttcaaggtgccgggcgccggacgcctgaccgtcaccttcactcccgaggacggctccgagccgattgagcacgtggtctatgactacggccaggacggcggcgtggcccaggtgcagtacaacgtcaacgattcgatccgcggcttcgctcgcgcctgcttcaactatggcctgatgcgccactacccggtgtacctgtccaccaagaacacgattttgaaggcctacgacggccagttcaaggacatcttcgccgaagtgttcgagaccgactacaaggacaagttcgacgaggctggactgacctacgagcaccgcctgatcgacgacatggtcgccagctccctcaagtggcacggcggctacatctgggcgtgcaagaactacgacggcgacgtgcagtccgactccgtggctcagggcttcggctcgctgggcctgatgacctccgtgctgatgaccccggacggccagaccgtcgaggccgaggccgcgcacggtaccgtgacccgccattaccgtcgctggctcaagggcgagaagacctccaccaacccgatcgcctcgatcttcgcgtggaccggcggactcaagcaccgcgctgacctggacggcacgcccgaggttcgccacttcgccgagacgctggagaaggtcatcgtcgacaccgtcgaaggcggtcagatgaccaaggatctggccatgctggtgggaccggatcaggcgtggctcgacaccgagggcttcatgaacgcgctggacgagaacctttccaaggcgctgaccgcgtgaccggccgggcggggttctccggcggctcccgccaccggtgatcgccgccggcaatccatcgccatcaaggcccgcatcccatgtccccacacgagatgcgggccttgtgcatatggtgaggctacaatcgaaagtcacagtattcgcatgactgaaagggcgtgaccatgtcaggacgacgcatggtgtcttgtctgaaactcatcgccgccgcgatggcgacgggtcttctgctcacgacggcgggatgcgcgtcaacggacgataccaacactccggacggcggcaccgtcacgcaatccaccggggcggtggcgatattcaccccatcggacggcatcaccctctcccagcacacgccgttgaacaagtgggcgaaactggtgcccgacatcacctccgagctcaagaagcaaggattcaaatccgcgaacatcaccacgaccacatccagtgacctcgccaagcagagccaggacattcaggattacgtcgtcaatcatgcggtgtcggcgcaaagcgggaaagacagcgccaacaagaaagacggtgctgacgagaaggaaataacgctgatcgtcgcgcccgcagccgaaacgcagacatccacccggcaatacggcgattacgtcagccagacgagcggcacggcgacggatagaaccggttcagacgaggccggttcaacggatgcatcggaatcgactgacacatccgaatcggcgaatgcatccagctcggataacgcatccgactcgacggacacgcaatcgatgccccgtatggcgaacgcattgcagctggccaaggactcgggcatgcacgtggtgctcgtggccaatccggtgaaggacttcacccccgacgctttcgtcgaactgtcgacagccgaacgcatcgggcagatccaggcgagcaagcttgccgacaaactgcaactcgacaccatcagcaaggacaatccgaaggccgtggagatcctgctgccctacaccgcatccgctgacggcagtgacgacgaattcgccaaggaggccttcgcaggcgcctggtccgtgctgcagccgtatttcaagaagggcacggcatacagtccgtccggactgctgacggccgacacgaccgacgggcagtgggagtcggtcgccttcaaaatcgacaaggattcgcgcatcaccgacgagatcaccaatcgtctcaaacagaaggattcggcctcgcacacccgaatcgacggcatcatcgccatgaacgattacgtggcttccggagtggtcgacgcgctcgaccatctcggatacaccggttcggcggccgacatcaacccctccatcacactgcccggaatcgtcggcaacatcaccggaaagcaggatctccaccgcaagaaggtgccggatccgatcaaggcgccggaaaacgacggcgacgccgccaacgacgggtcggcctcggaaaaggccagggacacgcagtggcccatcatcaccggatatggcgcgtacgtcgacgaactgccgcaactcgtcagcggccatcaatggatgaccgccgtcgaggaccgcaagggcgccgcgacgcagctcgcgcagatgtgcctgaaaatcaatcagggcacggcggtgaaatcgccgcagaacctgaccaaggggacgtatccgggcgtcgcggggaagaacatgccgacgctgcgccccgacctggtcgcggtcagcgcgtcgaacctcaagagcacgctgatcgaccccggctacatcactctggccgacgcggggatgtgacagacgcagggattgcgcgtcacagggaatgtagcaggcgcggcaataccgggatatacgcgagtcggccgtcacctcaaccatccgtcatgatgacgggaaccggttgaggtgacggccgactcgttgcccggctggacttccgctcagcggcccttcggggcgtaaatgcgcgtgtcgatgagttcgccgaagtggtcgatcaccgcttgacggcgtgccttcatgctggcggtcagcagtccgttctcctcggtgaacggctccggcacgatctcgaatttgcgaatcgactctgcccgcgacaccagatcgttggcggcgttgaccgcgcgctcgacctcggcgtagacgatcgggttgcgcacggcttcggcgaggtcggagacctgctccacaccctgcgcggccagccaggcgttggtctcatcgagatccagggagacgatcgccgcgatgaacggcttacggtcaccgatgacgacgcactggtccaccaccggcgatgtcatcacgctggcctccaatatgcccggagacacgttcttgccgcctgccgtgatgatcaggtccttcttgcgtccggtgatggtgacaaacccgtcgtcgtcgatgtcgccgagatcccccgtgtgcaaccatccgtcaacgatctggctctgggtgatttcaggatggttatggtatccgacgcagaccgcacggctcttgatgcatagttcgccgtcctcgccgagccctaccgacaccccctgcagcggcaggccgaccgtgccgatgcgatatcccttggttggattcaccatggccggggcgcaggtctccgtcatgccatacccctcaagcagcggcagtccgacaccgttgaagaagtgtgcgatggccccgtccagaggagcgccgccggacaccgcatattcgcagtggccgccgaacacgcccatgatcgtgcgatagatcaggcggtcgtacatggcgtggcgcatccgcagcgaggccgagaacccgttgccctcctgctgcgcgtgcgaccattcgcgtgcggtggccgcggccttggcgaagatgcgccctttcatgccggcacccgccttctgcgaggcggcgttgtacaccttctcgaagatgcgcggcacggccagtatgaaggacggcttgaactcgccgaaatcagacagaatggtcttgaggttgttggacagccccagctccacgtcaccggcaaagcagtacagcaccatgtaccgcgcgaatgcgtgagccagcggaaggaacagcagtagacggcggtcacgcccataggcgatgtcgggcatggattgcgtaccggcataggtgacgtacacgaagttgccgtgtgacagttcaatgcccttcggcatgccggtggagcccgacgtgtacacgatggttgccaggtcgtcgcccttcaccagacgctcgcgctcccagaactcctcgtcactcactccacgcccgtattcctccagcgtgttcagcgcaccgaaatcgatgacgtacacgtctttcagcgtgctgcagcgcgagcggacggactcgatcttgtcacgctgcgcatcgttctcggcgaacgccatcgtcacctgggagtcattgaagatcgtggcgacctgagccggcgagttggtctcgtagacgggcacggtgagggagccgatggacatgatggccatgtccagcgcagcccattgccatgaggtggaagagatgatcgacaccgcgtcccctggcatgacgccacgggcgatcaggcccttggccagtgcgatgaccttgtcgcggaattcggcggccgtgaacgagcgccatgagccggtaccgtccttgtacgagaccagcggctcgtcgggcttgcgttcagcgcgttcgaccaccaccgagaacacgtttttatcgccgtcaatgggcttggtgaccggttgcgtatattccttgagcatttcagcgctcccctcgactgtgggccggtcgttccggcgaacgggtggcatctgcatcgccaccgttcaattgtacggcttttccatacgaattcggggcagcatcgccgtcaatcgggtttcaggccgatgcgcatgggtctcacacgggcgagcggatcaagatatgtcgtcgccgtcccctcgttttgcagtcgaaccctcctgactccccaatggaggcatcggccgtcgcaatggtcggatgcccctcccacttcgccgatgacgtcgccgcgtctcacggctgttccggcaacgccctcggtatgcgccggctcgaacgtcgacacaaggtcaccgtggttgacactgacgaccgacttaccgccgacactcccggcgaacgatatgatgccatccgcaggggcatacagttcatcgccgtcggatgcctgcagatccacgccgcgatgcccggaaagccatggccggtcaggtgggtcgaaatccgcgatgacggccggctgacccacaggccaaagccataccgcccgacacgccgcctgtcgtcctgcgcataacgtcaccgcggtgaagacctcttccccggcggatgcggagggcacccgcaatagcgcccagttcatcatcgcagcgaacatcacggcaacggacatgcagcacagccggatcatggtccgtttgcaacgctccctgcggtgaagcgcgaattgcctgcgccgtatggcatggcggtcataccgcacctgaggatggtgccacgctccccgctgcccatctaaatcatcattcagcatcagtctcttcccccattccgtcgtctgtcgccggaacgtccccgcgccccggcatccccagcatcgcacaccgatgcacggcggagggcgaaaaacaaccgatgtggtcgaaggctcgggagttatccacatttcggcgtgtcgcgccgatactgcacggcacttgctgctggaatcgcctgacaatgcccgggagctgtttgtaggcgagtgcaatccgggaggcccgtggccgcaggccatccccacttacagggcccggagagctgtcgcgaagcaactgggggcggtcatccgcagcaatgcggcggatagccacttgcgtccccgcattgccacaccatcgatatttcgcgtcaaaatcgcattgtgtggctttccatcggccacacaacgcgatgtgagccttcacatcgcgtggtatggccgacattcgaatcataggacggccattttgcaatgattcgggattgttctcgtctccgtcccttgccacaccatcttaaaaaccatcagaattcgcatagtgtggcacgcggagacgcgcacacgacggcgcatgcgatgcatcggtgcgcaggtgcgggatgagcgcgggaaagcaaaaaccctcaacgtttccgttgagggttttctatggctcctgcggctgggcttgaaccagcgaccgtccgattaacagtcggatgctctgccaactgagctacgcaggaatgatttcctgtgctgagctaactgctgtgcacaagatgaatatattacacacaaatcgcatggatgcaacttgagtgctcgcctcggcgtgtcgcctgtaattccaatggttgattgatgacgagaactgacagtcggatgccgtggacgcaagcaaattatcggtttatcgacggtttcgcccgcgaattcccgctgtttgtaggcgagtgcaatccgcgaggcggaggggctacatgcagattttgttcatgggcatggcggaatcgatggggcaatcgggcgcggaaggggcctcgccggcctctacgaggttcacgccgagcatggcgaccatcgcgccattgtcggtgcacagcttgagccgagggatgcgcacctcgactccggcccgctcaccgtattcgagcagcttcgcacgcagctgcgagttggcggagaaccctccgcctacgatcagagtcttggaatcatactgctcgcacccgcgcatggccttgcgggccagaaccgtggccacggagtcagccagcgaagcgcacacgtcgtcaatgggaacgtcccgccccgcagcctgctgttcctcaatccaccgtgcgacggcggtcttgacgccggagaagctgaaatcatacggatgcgccgcaccggccttcccctgagtcaggccctgcggcaccttgatggccttgggatcacccagctgagcgtgacggtcgatatgcgggccgccggggtacgggaagcccagcaaacgcgcgaccttgtcgaagcactcccccgcagcgtcatccaacgtggtgccgaccacgtcgacatgccgcgcgacatcgcgcacatgcagcagcgacgtgtgtccaccggacacgatcagcgccagcgtatccttaggaaacggcccgaattgcagctgcgtgacggcgatatgcccgatgacatgattgatgccgtacaacggcttgttcgccgcccatgcaagcgctttggcacccgaaacgcccacggcgaggcatccggcgaggccggggcccgccgacaccgctatggcatccacgtcgccgagttccaacccggcgtcggagagcgcctgggacacgcacggcacgaacgcctcggcgtgcgcgcgagaggcgatttccggaatcacgccgccataacgggcgtgctcctccatcgacgaggcgacgacgttggaacgcagcgtgcgcccctgtacgattgcagcggcggtttcgtcgcatgtcgattcgatgcccagtacgatcggttcgctcatggttgcgtctcctgtcctgtttgtttcgtcatgtcgccggcggcggacgtatcaccggcggcaccagccacaccgccattgccgctgaacccgacgatgcgcggttcaaggtcaagcgccatcacatacgcgtcgatgccttccggctggtagtaccgtttgcgcagtccgatgcgctggaatccgaaccggtggtacaacgcgatggccgggtcgttgacgacgctgacttcgagcagcatccgtctggctccctgtcgacgtgcgcgagatatcaggtgattcatcatcgcgaccgcgatgccctgcctctgatgggtcttgctgacgcctatgtccatgatctccgcgtcgtcgccgtcataccagtatccggcgaatccgcggatggcgggttcacggtccgtgtcgcgcccatccgcctcgtccacgtcgaagacgtatacgcgtgccggcgcgtcgagctcctgcctgatcgaggcctcgctccacgcatggttgccgaacagctcgacttccagcgcccttatcgcgccgacggccgtctcccgcccgatatcgtccagttcgcgcagcatcagtctgccctctgcgcgccagcatggttcagcacgtgtttgagcgggctgggtacttcggcatcgggccggcgcagatacagcggttcgacgggcgcttcgtcgtcggcatgtttcagcgccatctcggcgaacatcgccaggccggccgcccccgcatccagaatggatccctcgaccaccgagccgagagcatccaggctttgccatgcgtcggcgtatcgggccgccccgtgaccgaccacgtccacgatgtatcgcatgccgccaatctccgcgcgacggcgtacctcggcgttgacccgctccacgatatggccggggtagtcgatgtccatagcgatccaatggcaggaatccgtctctgagctcgtcacgccagcctcatggttcagggagaagtacaactgtttgcgacgggcgtcattcacgcacagagtgatgtgatgttccggctccggtctcccgtccacctggccattttgcgccgtatgcgacacatccgcgaggaatccggccgcgtccgctatgacggcatcgccgcgcagggcggcgcgcaacacggcgtcctgcgggtcgaggatgttctggccgatcagccgggcccccgtggcgaaggcgagcgccttggctgtgaccagccccgccctcagtccggtgaacggggccgggccgacgccgacgacgatgcagctgatgtccgcgggaccgagcccggcggcatccatcgcacgggcgatgttgacctgcagtttctcgacgtgggtgcgcgaatcggtctccacgatgggctcatgccccacgactcccacggtcgaaccgtacgaggtgtcgatcaccaacgtgcaaccatcagtcgcctgcatttgttcctcccgttcatacgcaacctgtacgagtctacatcgtccgtcagtcaccatcatcaggcggtcggggtcgtgaatcgcgagatacgcgccccatcccacgccgggccgaccggtaccagcgtgacgactctggtgccatcgcttgtcggctgcctctgcgcggttttgtcgtcctgcccgtcatcgagcgggcggtcgatatggacttccagacgttccggagccaacgtggaggccatctgctcgccccattccatcaggatcacggtgttggctccggggtcctccagctcctcgtcgagaccgagcgattccaactcgtccaacagtctttcctcgacgtcctgtccgggcgcataggcgtcgccgccgaggcggtacgcgtcgacatgcaccaggtgggcgtgcgacccgtcggcgaatcgtccgtcaagttcgcgggcgatggtgaacgtcggcgacacgatgggttccgttatgcccaatccggcgccgatgccctgcgcgaacgtcgtcttgcctgcgcccagcgggcccgacagcaacagtacgtcgccgccgtgcagcagcaaggccacacgccggcccagttcgcgcatgtcgtcgtcggtgggcacgcgcacaacgacgggatgcgcggcgtcggctccctggttccgtgtcacgccgacgttgcccgtttctgctgtttccatcgtttctttcattcccgtccctgccgttcctgtttcaatttcgatgtcgtcgttcatgtcatgcatgctctgcgggcacccggccgtggtcgcctcgccgcagggcgccgttctccggcgcggtcagtcccttcctttgtggctgatcagttcgatgcacctctccagcgcgtatacggggtcgcccccgttggttttgctctgttcgtccgcccaggcgagcatgcggatgcactgcccgagtcccgccgaggtccaacccgaaagctgtctcatggcgtttttcagcacccacgggttcgttttcgcctgggcctgcgtgatggtgccggccttgactgcggatgccttggcgatggtgcgcagtttcatcgcgagcgcgccgatcagcgcgatggggtccgttccctgttcgacggcggaacgcatggcgatgatggcctcggccgtgcggccggctatggccttgtccgccacggagaaaccggtcacctgcgggttcgaggtcaggtaccggttgacaagatccagggtgatggggtcgtcatcgaaatcgaagcacagttgggagcacatggcggccatttctccggtccgctcgccgagcaccgcgacgagctgctgggcggccaatggctcgacgcggcggtgctccccctcgaatatctgcagcacgaagttgagtttcgcctccggtttcttcaggtcggcgaccgtctccttgcacgcgcccgccttgacgagttggtcgagcagccgtttgcccttgacccctccttcatgccggcagatgacgatgctggatgcacccggatcggcgcatgcctgacggcagtagcgcaccatggattcgcccagcttgtcatcggcgttctgcagattgtcgacgacgaccacggcgacatcggcgagcagggaagggctgacggcctcatcgaatgcgtactggtcgcagccggtcgcatccaggtcgatgcgctcggcgtcgggccgatcgtgcagcgcacggcggatgagatcgcgcccggttcgcttattgagatatgcgtcaccgccgaacacgatgatgaacggggcttgcgagcctgccttgtttgccatggtctccatcttcccatacagctggacaagagccgtcatgcgctcccgtcatcgatgcgacgggaatggctcccgccgtgactttcgtgtgcggcaccggccggtctcctccgtcggtgtcgccgtcgaacatcgttacggtctgcgaccaccatatccgtatccggtcacacagacggggacgaaacgactggccgccgtcgccggatccgtcggatctcagcagacgcaaccatcgggtggccagtatcagcaccgtggcgcacgccgattcgaccaacaccatcagcaatgcacccggtatgccaccggcccacggcatggtcgcaaactcgttgtccgacaccatcgcggcgacgcgttccatgacggacgtgccgcatcccgcaatccaggccaagacgtatccgcattgcggcatcagccaggatatgaacagcgcggcgagtcctgccatggtggcgaatcccacgaccgggccgacgagcagattcgccggcaccgaggcgagaggcagttgcggatccatcaggatctgtatcggcagagtgagcgactgcgcggcgatggtcatggcgagcggagccgacagcaatcggggcagcatgcacgccaaccaatcggtcaaagggccggcgaacagcacgatgcccaatacggccgcgcaggacaacgcgaaaccgtagctgaccgacatcgagggagcgatgagaaggacgatgatcaccgtccagctcagcgaactcaccgactgccctcgacggccggccgccaccgcggcagcgccgaacagtcccatgagcaatgcgcgcagcaccgaatcggacgggaacacgactatcgccagcatcacgtccgacaccgccatcaccagtcctgtcgcccatcgaggggcgagcacgcgggagcacagcctgcgcaccagccccgcgatgaccatgaaatgccctcccgacaccgccatcaggtgcatgatgccgctgcgccggaactgctccttgagtagcgccgcatacgcggcatcgacgccgccgacacgttccgtccccgatgacaggccttcttcagacccatgtgacgccgcaccggatgcggtatcgcgcacccggaccgcatcctgcccgagcacgccgacggtcagccccggcaccagcacgcgcgcctgatccgacaggcggtcgcaggcgcgcagtagcccctgctgcatggccttgacgatgcgggccgttccggaaggcgcagaaaccacatccggcacgcgcatatcgtcacaggtcagccacagcggctgacggccatacgacgccgtgctcagcgtgccgggaaaacggtagaccgccgtgtcggtcagcgccgaacagacgtctcccgacaacagcacgcggatatcggcgcgcgaaggcaccggcgagcgttccgacagcggattcgccggggatcgccgtatggacagcgacaccacgcgcccgtcaacctggcaatcggaacccctcaccgtcgacgatacggccggggagcgcacccgcaccacggccaccacgtcggcgggcccgtcacgggcctggacatgcgccgcatcatgccagcgcacactgtccgcggtcaccgccgcggcggccgacagtagtccggccacggccatcacggccacggcatccccgagcgaggctcgcaacgggcgtatcagcccgtgtgacgccagcgacggcacaacgaggaccaccggcagcagcatcacagccagcgcaccaatcgcataccccgtgaccgacatcgggtcatcatccatcaaggtcagccatcgccaccattggtgagccgccgccgaagccatccacgcggcgagaaccgccggcagcatcctgaagtccctaccgccgttttcgcggcggatggcgaaggcccgcgatgacgggcgttcccgatgcccatcggtcgagtcgcgacgccttccggtatggttcctccgacggcggtcgtggcagccgccaccctgcatatgcccgtcatcccgcatgtaccgtctcctcatcccccacctcacacacgcacccacggccgtatcttggtgagcgtcttcgcgccgatgccggagacatccagcagctggtcgacgctggtgaacctcccgatgctgcgccggtgatcgagaatgcgctgcgcggtcaccggccccacgccgggaatggaatccagctgttctgcggtcgcggtattgagatcgatcctcgtatctgcggtggccccatcgtccgaaccgtcactcccctgctgcgatgatcgcccgttctgcgcagcctgactgcccgcggaggactccacgccgtctccttgcgattcggcgtcgcccgccccaccggaattctcctgatcggagcccgttccgccagagttcgacccgtcgccattcacggagtcgctgccgtcacttccaccgggtaacgtttcggcgatacccgtttccttccctcccgcgttctgcatcgcggcgttatgggattgagccgacacgtaccgcagggactgctgcagcagcatcgtcaggctcgcgcacagggccgtggtcagcaccagcatcaccgtcaccgcgtggaacgggcggaatctcagccgcggcacgtcccgcttcgcggactggcctcgcatgccgtcgtcagggcgcacacccatcagacggcttattggctcgacggcaggcgtggtggaatcggccacgtcggtatgtttctcggtatgactttcgccatgtgacggcaccggtctggaaaaatcccccggtgccgtcgccggaggaggcacgcccgttccggcatccgtcgcgacagatgttccgatcccgattacgtcgggcatggcaggaatcccggcgtggcggccatcgtccatgccgcgcaaccgccgagtcgccgtttgatctcctgaatgagaaatgcccatgcttccagcgtgagggaacatgggcatgaagtccagccgaatcggcctatgtggtcgaaggctcgggagttatccacattttcggcgtgtcgccggcggaatcactcggcggggacgatggagacgatcttcggggccttgacgatcaccttgtgcggcgtcttgccgcccaaccggtcggcgaccgcctcaagcgcctgcttttcgaggtcggctgggtcgatgtcaaccggcacctcaagcttggcacgcaccttgcccttgatctgcaccacggcggtgacggtgtcatggccgacgtacttctcgtcggcgacgggccacggctcggcggacagggattcgtcatgcccgagcttggaccacatctcctcgcagatgtgcggcgcgatcggcgcgagcatgaggatcagaggctcaacggcggcgcgcggcacggcgggcagtgaggtcaggtggttgttgagcacgatgagcttggcgatggcggtgttcggacgcatgccctccatctccacggtcacctcggcgatcgtgttgttgagcagcttcagggtcttgacatccggggtgtcctcggtcacgtgcgcctcgccggaggtctcgtcgaccacgttgcgccacagtcgctgcaggaagcgcatgccgccgaccacgttgcgcgtgttccacgggcgggactcgtccagcgggcccatgctcatctcgtacaggcggaacgtgtccgcaccgtagttctcgtacatgtagtccggggtgacgatgttcttcaggctcttgcccatcttgccgaactcgcggttggcgtgctcgccgttccacgtgaacgtcggctcgccgtcagccccggcggggccttccacgacctcgtcggccggcacgtactggccacggtcatcggtgtaggcgtacgcctggatcatgccctggttgaacagcttgtggaacggctcggccgaatccacgtagccgaggtcgaagagcaccttgtgccagaagcgggagtagagcaggtggagcacggcgtgctcgacgccgccgatgtacaggtccacgccgccctcgtcgcccgagtacttgttgtggttcgggcccatccagtagtcgaactcgtccttctcgaccatgtgctcggtgtcagacgggtcgatgtaacgcatgtagtaccagcaggagccggcccagttcggcatggtgttggtgtcgcgatagtaggtcttcttgccgtcgcccaagtcgagctcgaccttgacccagtcctcgttgcggctcagcggcgcctccgggttggactcggcgtccatcgggtcgaaggtgcgcggctcgtagtcgggcacgtcgggcaggttgatcggcaaagccgagtccggcagcaggtgcggggtgccgtcctcgccatagacgatcgggaagggctcaccccagtagcgctggcgggagaacagccagtcgcgcagacggtagctgaccgtgcccttgcccacgccggcggattcgagccaggcgttgaccttggcgatggcgtcatcgacgcgcaggccgttaaggctcagcgcgtcgcccttggcggcggtggcctcgacggatgagttgatcacgatgccgtcgtgggagacgaacggggccttgccttcgtaattggccaggtcgtcgccggattcgggcaggggcttgacggtgtagatgaccggcagaccgaacttgacggcgaaatcgtaatcgcgctggtcgccgcccggcacggccatgatggcgccggtgccgtaatccatgagcacgtagtcggcggtgaacagcggcagcttggctccggtaatcgggttggtggcgtacaggccggtgaacaggccggtcttctcgccgccctcatccacacgatccttggcggtcttggcctcggcagcgagcctgtaggccttcactgcctcgaccggggtggcatagccgcccttccaatcctcgggaacgtcggccggccattcggcgggcacgttctccagcaggtgatgctccggggagacgacggcgaacgtggtgccgaacagggtgtcgggacgggtggtgtagatctccatgtccttgctaccgtcggcggtggccacggtgaagtgcacggaggcaccgtgggattcgccgatccagttgcgctgcatgagcttgaccttctcgggccagtcgatgccgtcgaggtcctctatgaggcggtggccgtacttggtgatgcgcatcgaccactggcgcagctcgcgctggaagaccgggaagttgccgcgttcggacttgccttcggcggtgacctcctcgttggcgagcacggtgcccagccccgggcaccagttgaccggggacttggagatgtaggcgaggcggaagtcgttgaggatgtcctgctgttcggcctggtcgaggtcggcccacgccttaccgtcggactcatggccggggatggccttctcgccggattcgaacttggcgacgagctcgctgaccgggcgggcggagcccttggagccggaggggttcacggcgtcctcgtcgtaccaggaatcgtagatgcgcgagaagatccactgggtccagcgcacatagccggggtcaatcgtcgcgaaggagcgacggtcatcgaaactcagtcccatgcggtgcagctggcgggacatgttggcgatgttggcaagcgtggtgacgcgcgggtgctgcccggtctgcacggcgtactgttccgcgggcagaccgaaggcgtcataacccatggcgtgcagcacgttctcgcccttcatgcggtggtagcgggaggccacgtcggaggcgaggtagcccagcgggtggcccacgtgcaggcccttgcctgacgggtatggaaacatgtccatcgcgaagtatgccgggcggccgtctgcgttgcggcccttgccgtccttgaggtcgccgttgacgttggcggcccagaacgtgcccttgtcatcccagatcttctgccatttgccttcgatgtcctgcgcgagtgccgcgttgtaacggtatgcgggttcggtggaatcggtggacgcgggttgcgtggtcttctcgttgtcactcatagacaaggattatcgccacgcaactggacaccatcctcacgcaggtcatggcatgccgcgcatccggtcgataatcgacgtgcgacgccgacggggcgagcctcgcgcagccccgccggccttcatcattcgtcgccctgctccgggtccgacgacgccgtgtccgacgatgccgcgggatccggcggattgagcttggagtcgacagtgtagccgatctgccggcgcatgccccgcacggcctgccgccacgtgccgtcgtcgatcatgtcgctcagtatgtcaccgatgctgtcggcgagctgcgtgttcccgtgcttgaccgcgatgccgtatcgctcctcgccgaacggagccccgaccacctgcacgtacccgttgcctttcacggtcgcgaggccggtgaggatggcgtcgcccgcggctacagcgtcgacgtcaccgatgagcagcgacgtcaggcactgcccgtaatcgtcacgctcctcgatggacgccttgggcgcctggctgcgcacggtgtcggtcacgtcgctgccggcaaccacgcacgccttgcgcccgttcatgtccttgatgccggtgatgtcgcccgcgtcggcggccctcaccagcagatcctgccggacgattagatacgggccggtcatcgtcaccgccgactcatgccgttcggtgatgccgaagctggacaccaccatgtcgacctgcgcgctttccagcatggagacgcgggaacggggcgtcaccggcttgaagacgatctgcttgtccgcgtatcccagcgccttggcgacgtaacgggccacatccacgtcgaagcccgaatacccgccgttgtgccatacgcccagaccgggctggtcggaggcgacgccgatcgacaccgtgggcccctccggctgccgtatcgacacgccgttcgcatcatcccgggaactcgaggagccgcaggcggtcagggatcccgcggtccacagcaccgcagccagcgccgccgaaaagcgacgcatgatgcgccggcgccccgccttcgtgtgttgcagccctgtcatgccgttcccgtcatttgaacatgcgcgaacgggtcaggaaccacgcgacgacggcggagagcacgacggatatcgcgatgatcagcgtgaagccccatgtcttgccggtgaacggcatgcccagctgccccggcacgaagttcatgccgtacatggagaagatcagcgtcgggatcgacagcgtgatggagatgatcgtgaagatgcgcatcacgttgttcaggttgttggagacgatcgaggcgaaggcgtcggtcatgttcgcgagaacgccgctgtagatgttcgccatctcgatggcctgcttgttctcgatgatgacgtcgtcgagcaggtcctcgtcgtccgggtactgctggatgcgcgcgagcgtggtcagcttctccatgacgatctcgttcgatttgagcgacgtggtgaaatagaccaaggtcttgctcagctcaagcagcatcatgatctcgcggttctgcatggcgtgacgcagcttgaattcgagcttgtcgctttcacggtcgatgatgcgcaggtacctcaggtatgtgctggcgttgcggtagaggatctggaggatgaagcgcgaacgcatgaacgtgttgaaccctcggatcgttccctccatgaacgggtgcagcaccggcgtgtcctgcatgcatacggtgatgatgaggtcttcggtgacgatgatcgacagagggatggtctcgtaccagtcacggcctccgcgctcctcgacggtcgggatgtccacgatgatcatcgtgtaatcgtcctcgacgtcgatgcgcgaacgttcctcgtcatccaacggggcgcgcaggtcggcgaggtcgacgccggtctgctgggagaccgtggcgagttccacgtcggtgggttcggacagacacagccaggagccgttctcaggtttttcgatctgctccacttggccgttaatcgtgctgaacatcctcaacatgtagtctcacccacctctcataaccgaacactaccgaacatgaccggacccgcgggcggcatgtcacgtcgtctggaagcctcaacaaggatagcccttatgccacgacttgcaaatccgccgcggccggccccgccgccggcttcacccctcgatcggcttccacatcggcatgtgcgggccgtgcagggactgcgggccgttctcccaatcgcacagagcagcgaccgccggcccctggttgaacgccgtcatcatccattcgacgccgcccgaaggccggtataccggtctgagcgtcgaccagaacgcgttgcgcatgccatccaggttgctcaggttgtcggggtccatgccgagcagggtctcgatcgtggccacatgccatgagccgtgcccgacgagcatcagggtggtcggctcatcggcatgctccgcgttgatgccgcgcaccaggtcgagcaccgcatcggcgccgcgcagtcctgtggcggtgcggctctccacgccgaacgcgagctcgccgccggtgtggacccgccacgaatcataggcgtcggcatgctccgctcgaatctcgtcgcgggtcatgccctcccactgcccgaagctgcgttcgcgcaggcgcgcgtccgcggtcacgtccagccccagcatatcggcgaacgcgtgcgcggtctgcaacgcgcggaacaggtcggacgagacgacgaccatgcgtcgcgaggatgcggggacctgccggtattcctcgatgtcgctggatttcgccgcccccggccccggctgggccagcgtatccggatgccgggcgatgttggccaccttcgcccagtagtagcgtcgcgcaagctccgacgcgctctggtcggcctgccactggccgatgatgtcgaggggcacgtcgatctgcccctgcaaccgcctcgccacattgaaggcggtccgtccgtgccgcagaaacaccacttcgtcaatcatgttcgtccttaccgtcgccgcatgaatccgtgccatcacacatcctacaggcatcgacctatatccgatcggctgtaacaccgatggcggaatgcgtccggcgtcacgatgcacccgcgactacagggatatcgacgggaccacggccgccgggcgctcgtcgatcgcggacagtccgctcacatcggacgcgtagaaccgcgtgaggtcggcggtgaacttggcgaggctcgcctcgctgctgtagagcatgtgcccggccgggtagtaggcgaagaccacgttgcggcgcagcggcttcggcagcatcaggtgatcgatgtcgtattcggtctggaagaacggcgtgcacaggtcgtagacgccgttgccgagcagcaccttcatggtcggctggtgcgcgatggccgcggccagatcgggcagcacgttcggttgggtcatgacccagcccgattcgccgggcatccggtgccaccacatccagcccttgcccggctcggtggcgttccagtcgaagtcggcgaagcccttgcgctccggcacgcggtcccagccgagctcatcgcgcagataggcgttgcacaggctcgaatacgcggggtcgagccagacgtcgtcgacgacgaacgtctcctcgtcgttcatgcggtcgaggtcgtagccggcgacgcggccatcgtagcgtccgacgatcttgtcttcgtcatgcagcagcgccttgcggaacctcgggtcggacacgcgcagattggagtcgtagacataccgctcgtccagtccggtcagctcggcgtatcggcgtgcgaccttatgccgggtctcgtcgtcaagcgagtccccggcggccagggcgagacgcagcggccccgcggcgaaggcacgggcggccttcagatgctcatcgagcttgacgtccgacgcggctcggccgtgatatttcgccacggacgcataggacgggaaatatccgacgtagaattcgtcgatcaggtcggacgtgaacgtgtagtcgagcacgttggagatgagcgtcagtccgttcagcgccacaccgtcctgctgcagccggtatgcgagcgccgcgccgcgcgtggtgccgtaggattcgccgagcacgtatttgggcgagttccagcggtggtgtttgctcaggtacgccctgatgaacgcgctgaagccggcgacgtcgccgtccaccgaccacagttccggcttggccgcgtcgaggatctcggagaatccggcgccggccgcgtcgatgaacacgaggtcggagacgggcagcagcgtgtgcgcgttgtccacgagcgcgtagggggcggccggcaccggagcggcgtcggggacgttgatgcgcttcggggcgatcgaacccatgagcaggaacgtggtggatgagcccgggcctccgttgaagatgaacgtgaccggtcgggccgggtctgtcttgccttcgccgtttacgaggtcgaacgcggtgaagaagatgctcgcggccttgggtaccttcggtgtgtcgatgagtatcgtgccgacggtcgccgcatagtcgagttcgccgccattgacggtgatgctgtgtctggtggtgtgctcgcatgcctccggcagctgcttgccctgggcgggtgccgccgcgacgggtccggcgttgccggcgttctgggtgttctgggtgttcgtgtcgctcatatctgtcgctccttggatgtcagtgcaactatacgccggccgggcaggccgtactggatcctggccatggtttgccgcgtcatcggcgccgcctattcggcggcgtcatccgactcgacggtaccttccggctcatctgcgccttccgtctcatcgatgccgtccagtctggcttcgtgcagcgtggtgtagccggtgtcggggtccttgcgggtcacgtatgccttggtggagacctccagtatctcgcccgtcttgctttcaggggcggagacgatgacctggaaacccagtctcggcagtacggacagcgcgcgccgcgtataccggccgtcggccttgatgagcgcctcgtcaaggaagagcgtcgtgtaggaaggcttgagcttgttgtccatgccgccgccgagcaggtagatcagcgccgcgccgtacacgaacgaggtcagctcctgcagggcgccgccggaccgtccgccggtcgaggtgatgcgttcgacctgcccgtccgagtggcgcacgagcgcgtagaacgaggatcggcaccgcgggtcgaggttgcgggcgccgtagcttttcacgccgttgacgtccctgatctgcccgatctcgcggcgcagcatgtcgatcatcgcggcgcaggacgcgaacgcgcaccgggccccgtcaagatcgtcgtccgtctgtgccgccttgcggtcgttgagggtgccgatcacgcgggtcagggccgaccagaacgcgcgctcggggcgccgtacgtccgcgtgcagggacaggctgccgtggtgcgggccgaactgctggccgtccagcatcgcgttgatgcgttccagctggtcgtggatgtctccggcgtcggtgtctatcgcgcgtttgatggtcaggaagctcatcagcagcttgtcgaggcagttgtggtattcgacggcggtggcttcgacggtggcgagcttcgaaaggctttccaactcgtcctggtaataccggtagtcgtccacgctggcggcgatcgtatcgtcaccgcccgcatacatctcgatataggcgcccatccgcgcctcgacggcggtgcgggccgatgccgcacgaccttcgagcatggagacgcgcgcctccaggtccttgccgatgccggcgatgatacggtcggcgaaggtatccccctgagccatacgctgcggcgcccccgcgccgatgatcatgtgggcgcgggtcgtcgcatcccccagaccggagagacgctgctcatatgattcggcgagcgcctcctccacctcgtccgtcaggagagtccgtccgttcgtgacggcttttggcgaaacgtccgccgcttccccatcgagcggccgcgtctgcggttgcggctgcggctgcgcggcatgctcgtcgagccatgcctgcgctgcgttcaccgcctgatcggcgagctcggcctgccgttcgatgtcgatgcgctggcgctgcgagcggtcgagctccttggacagcgactcctgcaacgtgtcgagttcggcgagcttgggattgttcctgaccgaggcgatggtgcgttcgatgtcggcgatcgccgccttcgcgctgttctcgtcgatcttctcccatgcggtgtatgcgagctggtcggcgagttcgcgctctcgctgcaggcggtcggcctgttccttcgcgctcgcgtacgattgcgcggtctcgtcgcattggcgttgcgcgtcctggatgcgcgtgcgcagttgcgccaaatagctttcgttgacgaatccgatgacctgctgacggtccttgatgccatgctggccgcgtttgccggatttgatctgcccgtcggcttgcacctgccgcacggcatggtcggagtcgtcgatgccgtcgacgcacagggcgtcgagacgctcggagctggtctgctcgcgcagccagccggcgaacggggaatcctcgcggtagcgtagcttcgaggacagccacacctctccggccgttccgccggtcgcacccgtgttcgcgccgccgggcccgttcccggctcccccgcgttcggtgtcgacgaactgccaggtgcgccgcgccatggcgtgcgggtcgatggcgctgaccttggctgcgaatccacgctcatggcgcttgtcgacgaggatggtctgggccatggatccgtatgcggcgttcatggcgaggcgccaatgctcctgatcctcgcgcacgtccatgagctccgcgacgtacggcagttcgctcgggcccagcccggtggcccggcacagcatggcgcgggtctcgtccatctggcgggagatgcgggtgcgctgcgatttctggcgttcgtaatcgtcgttcagccgctgcagcgtctgcttgacggacgcgtgcgcggcgtacgtctggttgcgcatgtcgtccagcagtcccttgcgctgctcatatgagcgcatgaacgtcacggcctcgatgcgccgctcgtcccacgcgtgctcgtctttggggaactcctcgccggccgcctcgaacatgcgcccgatgcgctgtctgccggcggtgatgtccgccagcgcgcgttccgcctgccgcatttccgcgtcgagccgtgtcaggtcgccgccgtcgaggcctcgcatgcgctcgcgcaccgcgtcgatgcgggtgcgcaggctttcgatgcgcttgccggcagcccgcgcctcactgcgtcgctcgtcacgcagacgcctgtcgagcggctgccgttcgctgacctcgccgatcatgcggcggatcgcccatgctcggatcgtcgccgagccggacttcgtggccgggttcaccgcgtcgaacgagtggaccgcgtcacgggccgactcgtagtcgccatagctggcagtgatggcacgcaacttgcccatgcgtctggtcttttcctccatgcttcggaagttcgcgtcgtaacgctcgtaatcctccacggtcgcacgggccaggtccagcgcctcgggcacgcccagcacgccctgtttgaagatgtcgtcaaggcgggagggggcgtcggccgactggatgcgggccagcagacggcatgcctccgcgctcaggcccatgacatcccaaatgtgggtgtggaacgcctcggcgttcgggaaggtgacgcaccccggatacgtggatttcagctgcgtgggcgtgaacgacgactcgcggaacacgtccatgcggcgcgggtcgatcggcttgtcccatgccaggtacagccgtcggacgtcgccgcgcccgtcaccgggcatcagatagaggaacttgccgcaggacagtatctgaccggtggtgaagttgcggtaggtgtcgacgatcgcgccccatatggaccggggcgcgccggactcgtcccggccgcgcaggtacatcggttcgtcgacgccgccggagcctcccacgccgatcatgccgcgcaggtaggtgtagtcgcttcgttccgaacgccccgaattcgacgccttgttgaagggcgtgccggtcgggtagagcagcgatatctgcgcgtcgaccagcgtcgacttgccggattcgctcgcgccggcgagcaacgtcaccggcagttgcgagtccgtggagggacggaactcatggtagccctcataggatccccagttgacaagcctcctgctttccatcatccaccggtcggcgatcatctgcatgtccttgccgctcatcgtcactccccttcccgtgcagtgccgccgtccgaggcggtctcgtcgtcaatgtcgctgtcgttcgcgccattggcatcatcggcgcccttgatgttctcggcggcgtccgcatcggcgtcgtcatcgaacagcggagcctcgaacagttcggcgtcgggtcccgcgtcgtccgaatcgccatcgtcatcggcgccgctcgcatcggcgttcgacgtatcgccggctgcagaccgcgagccggccggggccatgtcaccggccggctcgtcatcgtcgtcccggtccgcgactgcgagccagctgtccgccagctgacggtccagcaccaccggcaccagcggcgtgatgcggtacatcgtctcgtcatcgtcgagctgcctgagatagccgtacgtgcacatgacggacacgatcgcgcccacctgcctgagcacgccctcctcgtcgttgcgcgaggcgaggtacccggcgccggtggcgagcgccgctcggatctcctcgaagctgaccagccattcgtccggcgcgacgtgggcgttctcgtattcgagcacgcggatgcgcaggaacgccagcagcgccgcctcctcacgtttgaggctcgcacgggtcttgagcgcgcgcagcgtcatgtccggcccgctcaccgcggtggcgtacatgacgcggtagtgctcgttgacgaccagatcgagcaggtcgttgttgagcgaacggatgaccgccgcgcggttgtcgagcgccaggtcatagaaacgtccgctgatgtagcgctcgcgtttgagcatgatcgccaccatgcgcgcgtcggcggtcatgtcgcccgtgtcgccctcgaacagggcgtatgggttgaccgcgccttccgcgtccgcgccatcgtattcgacgtccgccgcacccatgtcatccgcgccggtactggcactgtcggtatcggcactgccggtgccggtcatgtcgtcgtcaatcatgtccatgtccgcgtccggctgggcggcgtcgttcgtcaggtcgctcatgtcagtcctccttcacgatgtcgtgcaattcatcctcttgtgcgagcactgggccggtgatccagtccctcgggcttccgtctgccgatatgcaatgccatgcgacgccggctccgtccccgcagccgagctctcccaggaaaccgacgagctcgctttccttccgctcggctttcggcagcccgttgaagctggcgacgatgtcgatggcgccgttcccgtcgtccgcgtagacgggcgattcgaggatgagcgcggccatgcgccgcagccgcggtcccccgttgtcgatcatcgaacgcaggtcgggcgcggtcgcatcgcccggtgtctgcggtacggacaatcccggggtggtcgttcgtaccatcgggcgcgcggggcgcgacggcagcggagggaacctgccggccgcggtatcggtccggtacggtctcgcatcgtcgccctgatgcgccttcgcgtcggcgttgacgtgggcatacagacggttgagcttgccgagcatcgtgcggtatcgggtatcggtctgctgtcgcaccagacggctgatcgcctcgtcggatacgcgcatctggcgacgcaccgcctcgatgccgtcatagatgcgcgaaagctcggcacgcacctgatcgagcaggacgccggactcgccggccagatacggcgtgtgggcgatgtcgcgcagggccgcgtcgatctgctgccgtccttcgtcggtgatgatcacctggaacgcatcctcgaagcgtcttccgctgtcggactcgctgaaggacctgcggtattcgtcgtggtacgaggtcaggatgtcgtcgacgctcatgtcgcccgcctgcatgcggcggcggagcgcgtcaccgttgtcccgttcggtcagcacgagttcacgcaggtctatgggcacgccgcgcagcgtgttgtgaatcactgcaatcacgtcctcgacctgcgattcggtgagcgccgcatgccgctgaccgtggcgtatctgacgtatctcgtgtttgcgcgccttgatctcccggttgagcaacgccacgcgctcgccggggtcggcggtaagctgcatgcgcgcatgctcgatctccatgatgatcgagttcgcctgcgcgcccgacagcgtgcgggagtcatcctcaagccgcgacagcgcctcgatcgcacgatgggcgcgggcggtgagacggtacaggaaccggtgcgacgcggcgtcatgcgagttggcgagccatgcgtaatcgtcatcgccctcacgggtcaggtcggcgaggatgcgccgggaggcgtccgcgatggtctgatcctccctgagctggtattcgccggagtcgacgagccgggacaggctttgcgagaagctttcctccagggtctcacggggcagctcgccggtcaacgggtcgaaggccgcgcggagcagcgccacgtacatcatcgaattctgacggagcagcagtctcagcacgccggtttcatagaccggcctcagccgttccatctcccgtcggatatcacccacgaaaggcctcgctttccactcgtcctggctcggcgcacgtcacgttcgccggacaaaccacgctagcacaagacggcgctatcggcgtctcccgtcgcgtcaccgccacggagaacgcggccgcggccactggtacgctcactgcacgagaccgcgcagcagggcgatctcctcgcgatgcgtggtctcggtcagttccttggtttcgaggatcatcggcagccgtgacagacgcgggtcgttgaccattctggtgaagaacgggatgccgaggtggccgtcgccgatgttggcgtggcggtccttgtgcgatgacaggccgaactgggagtcgttgacgtgcaccgccttgacgcgttcgagcccgatgacgtcgtccagctgccgcatcacgccgtcgaagtcgttcaccagatcataaccggcgtccagcacatggcacgtgtcgacggtgacgcctacgttcgccttgtcatcgacgccgtcgatgatggtcgccagctcctcgaagtttcgcccgcattcggtgcccttgcccgccatcgtctccagcagcaccatgatgcccggctccagcccgaacacgcggttgaggccgtcgctgatcagagagcatccgcgatcgggcccttgccccacgtgcgcgccaggatggatgttgatgtatatctcctgcccggtctcacggatcggcgtcagcagtcggatgtcctcggcgagcgcccgtatggcgaactcgcgcttgtcgggatccttgccggcgaggttgtagacgtagggagcgtggacgacgagcgggccgtaatgctcggccgtcaactgccgcgcgaatgcgacggccccggacgggttgagcgccttggatggccgcccgtacggtgagcgcgggaagaacgcgaatgtggtgccgtgttcctcatgcgagcgtttcagcagcgcgctccacccgcctgccgtggacaggtgcgatccgatatacagttccttcatccgtgttgtcccttcattcgtatcgtttcccggcgatggttcccggctgtcgtggcgggtcggcgccgttttcatttcgccgcagtcgcatcctcaagataatcgcgcagcaccagggcatgattgacctgagggtccttggcggcgtacagcaaggttacgtcgggatactccgcgcagatgcgcagcagttcctcggcagcagcgttggcatcgagctccgtgatgtattgggcgcgaaattccgcgaatctggcgggatcgtgcccgaaccacttgcgcagctggggagagggggcgacgtccttcatccacaggtccaatgccgcgcgctccttcgtcatgccgcgaggccacagacggtcgaccagcacgcgatacccgtccggagcctccggcgactcatatatccgtttgattgcgatgcccatgcgtcccatgattggcttgcgcccgcgggatgtcaagcgtacataacgcaacgggatgccaaaacttggagatacgaccgttttcggtgggaaaggccccctatctgcgagttttggcatcctgccgcacgacccgctgatacggtgttatccttgcccgtacccgacgggcaaacgaacgagaggaatcgccatgaacaccatcgagaccgaacgactgctgctgcgcccttggaaggtcgatgacgcggctgaggcggcatcgctgttccggtatgccagcgacccggaaatcgggctgagatgcggctggccgccacacaccagcgtcgaaggcagcatgcatgacatacgcaatatcctcgcggtcgaaaacaactgggccattaccatcaagggcggcgcgccgaacagcaacgcgcctgtgggcagcatcgcgctcatgcccgtcagccactacaccgccgacgccgttgcctccgatcctgaactcaccaaacgctacggcaagtaccttggcgacaacgcgctggaagtcggatactggatcggccggccgttctggggtaagggatacatgcccgaagcattgaccgccgtgctcggctacgccttcgacacgctgcgcaaggacgcggtatggggcggccacttcgccgagaacacgcaatccgggcgagttcaggccaagtgcggcctgcacgtcgtcgccgagtcgaaacaggattactacccgctcatcgaccgtcattatgaccgcgtctaccgcatcatcaccgcgggcgaatggcgcgatgccgaacaccggcagatggcgaggatgatcgcctgattcacgaacgggcgtctctgcggcaacggcatataatgcaagacatgacgacccgcattgttcccatcgagccgcagtggttcatgcagaaggccgaagtccaatcgcgtacatggcgcgagctcaatcaggggcatatcccgcaggacatcgtggatgcgatcaccccggcattcgcactcaagctgacccgtggccacgccgccgaccccaaccaggttgtgctgatcgcgttggctgacgaccgtgtggtcggattcatcgaactgctgcgcactccgcggcccccgatcaatcggcccgaggccgcggaactggcgtcattgtacgtgttggaatccgagcatcgccacggagtcggccgcgctctggtcgaagccggacggcaggcagtcggcaacgaccggctcgtcttgtgggtcgtcggtttcaacaccaacgctcagggattctaccgacacatcggattccacaagaccggactgacccagaccgaggatatggggccggaactcgaaatgatcaactactagccggccgctggtccagctgtcgttcaagctgctgtgcaagacgctgaacgtgaatgcgagtggcctcgttggcgaagtctgcgcacgccttgctgccgtacagcgccgctccacacggatcggcaaagcgtgggtcgccgcacagagcggagcggacgacgccgagcgtgtctgaaaacggcatggtggcctgttcttccgcatcctgcggcacttgggccttggcggccttagccttgatgttcttatccataatctgcgcggccagccgttgcgcttccggcgaatccgacgtgactcccgtatcgaacaaccgcctccattgctcggcatcggcgagcatggaatcctgcgactgcctcagtcggctttcgcgaatccgtgagagccgactgcgctcctccgcatccagccgcgcccatcgctcggcggccgcgacgctgccaacaggatagatctttacgcggcgtcaaccgcaagacgtgacacgcgacgagtcgaaagattttgccgttctcccccgatccgggacgagaacaccgaacaaatatcattcccctcccggcatgaccgacaatcagatcatgcggaccgtaccacaccaggccattttcacccgaatatgacgtggtgtggcacgcggcggaataacggcgaaagacggcgaatgacaaaacgttgcaaaatggcggttcctataaatcaacgctggccacaccagcgaatgttaaggaaacatcgcattgtgtggcagaaccgttgccacacaatgccgatctgggtcattttcgcgctggtgtggccatgcgctcctcattcaggtctcagcgtgacaatactcgcgcacagtgatgggattcactcgaacagcgtcacccagtcggggtcgcgatggccgcgcgagtatcgagtttcggcgtcgggtatccggcgctgagcggccggcgcatctcttctgccgacacgtcggcctgcatggcgagcatgtcgaccgctatcgcgcggatgcgctcgtaacgctcccgatcgaggggatccttgcagtacgccaatccggtctgggccagtgcctgcagctctctggcctgctccagcaacgtgcggtctgcggcgatcatggtccacccgtcctcccatcgcaaggtctcatatccgtctaagctcagccattacgacgtaattgaccgtcagcatgccgattcccggctcagtttccatcatgcgtaccactcgggccgtctcagtcccagaaacggacgccgtttgcgggccaccgcggtctgagagatcaatgtcggcaatgaaaggaggatgccggcaaggatctcggcatcctcaacctggccaccacgctcggccaggcggtggggccctccatcgcctcggcggtcaagaccgtgaccggcacctttacagcggcatttgccatatccatcgtcatggccccgtgcgcggccggcttcgtgctgagccttcgaaaagtgcgatagccgtgacggcttggatgagattcgagaactacgttctgatcacgccttgccacccatcatgtcaatcgtacgcccgtcacctgccattatcgtcgaaaacagcaggcccggactgactgtaaggtgattgagcagttggacatcagcttcggttcttaaatcacagcggcttgacgaaatcctcgccgttgaaacagccggcgatggcgttgcattcgacgacgagtcgcggatcgatggcgagcgtatgatatgaatcttcgatcgccgtctcatgctcgatgagctcggcgcgaccgccatgcgcggcgacaaattgcctgatcacctcatacttgctgttcatagccgtctgccgtcttgtttgccattgagtccaacagtcgcacgaccttgaaatgctcgaacaccacaagagagtcatcgttcagcggaaaatccgggtcagcgaactcgttgcggtattccggcgcgttccagaaggactcgtgggtatgcctccacgcggcagccgtggtgtcgccctcgccctcatcgatggcgtgccggtcggtgatcttcccaagcggaataacatcaaccgcggtggtgacgagtatggccaccggccgttcactggaatccaccagtgccgagcgttcgccgacctgcggcagcggttcgtcatcctcttcgtattcaatcatcaatgcggcggtcgcggtcttcgttccggcaagaatgagccctaccagacggtcacgttcaggtccggggaacatgaattccgccttgggcaggttccctggttcgggtgccgtgctgatgcgcgtatagtattccagcccatcctcgtgatcgatgcgagccccgcaatgctgctgcgccgcaagactcgcccggttgtccttatgaacgctcaggtacgcctcgtcaatgccgagctcacgcgccttgtcgagcgtgagccgcaagccgactgtggcatatccacggccgcgatattgaggggcgatgccatagcctatatgcccggctccgacacgcagattgtcgttcaggcgatgccgcaaattgaagattcccacatacgcaccctcatcattgatgagaacgtacttgctgctcggcacccagccaggctgcagcccgatgccacgcgattgttcttcaagctcatgcacatacacggcgaaccgctcgcggtccatgccggccgcctggttctcgaacccgttctcgtccgccggaaactcagagaacagctcaaacgtccgctccggatccgcccgccacacttccgtcaaccgcattctcgccctttcgtttccgccatactagcccacccggataacagggtgcggacgttttcctggagactggactaaaggatatcatatgtccggtcccgggcggcatgcggcggaagcgggccgccgaactgttcggcgcgggtgccgggcggccggggcgttcgccgcctccgagggcgggtacgggtaccgaagggtcaaggccatgctccgaacccgcgtctcggagaaggtgctccgcagccccatgccataacctgcaccgtccaagccggcgaaaaccacaccatcatcatcatcgataacaccaccagacctccagaaaacgccgcggacgcagaggacctgatccagccgttccaccgcggcgacgacacccgcatggccaacaggcccgggcacggactcggcctgtccatcgccaaggcatgcaccgacgccatgcaggccacgctcgccgtcagcaggccctcacccggcaccttccgaaccgaaatcaagctaccgaacaggccgacgcagcgccattgcccgcagcagaaggaacatggacaccgccctcatgccgggcaataggcataatcctcctcattcagccccgtttgcatcgtccccgcgacgtgtgtggcggtcgcagttagacattctcggcgcacagattcttatcatagactggacgaatgtgtaaaagattcgcgctcgacctggattggaacgccatcgcggcgcaattctcggtggccgaggaagacgtgcgcggcgacgttctcccccgcccctcgtacaacatcgccccaacgcagaacatcgccgtcatcgcgcagggcaaagacgggcatcgacacctgaccggcgcatactggtcgctgattcccagctggagtcctggcaagaccctgccctaccccacctacaacgcgcgggtggaatccgctcacgtcaaatccaccttcgcggaatcgacccgctcccggcgcacgatcattccggcgtcggggtattacgagtggagggggcggcgcccgttctatttcagcccggagatggaatcgacggcgcttgcgatggccgggctgtattcgtggcggcggccttccgcggcatccctatggcagctgacggcgacgattctcacgtgccctgcggtggatgggccggcgacggtgcatgaccgtatgccgctgctggtgccggccggtatgacgtccgagtggctggatccttcaatcgacggcgcccgtctgctcgcgccgatgcgcaaggccggtgccgagctgtccgcgcggctgcatttccatgaggtcgctccgccggagggcgacgggccgagcctgatccgtccaatcaaccgcgaggagcccatgcggctgttctagttctgccgcagatcggcgcttcttccccgatacggttgagcgcacggccggcacgggcagcctccgccgacaggctgagccgcggcggacgacggagccgcgtgtagacgaacgcaacaggcgtttgcgtccttaagtgcgcgccgaaacgacgaccgtgcgcacttaggaacgcaaacagggccatttgcgttgctatgtgcgcgcacttgccggttcggcgcgcacttaggaacgcaaacgcacggaaaccgcgactcatcgtcgacagcccaagccgactccgccattttcaccggcccagccgacccaaccaacccgtcatcttccaccggtccgaccaacggtgggcatataccctgagcacaggaacattcggtgaaagccaacggagggggattcatggacgggtcggacgtcatcgcgcggcgggagttcatgccgacgtacatctggctggatgtggcgtttctgattggtttcgcggcgttgctggtgtggcgccgcaaatacatgacgctgctggtcgggctggtgatgggcggcgtgtatttcgccgtgggctatggcgcgttcaatctgctgacgcattcacgttcgatcagcggcggcagcatgttctgggtgctgctgtggatgagcgtaagttatgggttcacgaacttctcatggctgtggttgtggctgagccgcgaccgccatctggcggaatggtcgatgctgattctcgtctggtggctctgctgcccgttgatgtcgcagacgtttacggcccggttcgcgtccggcatgcagccgattgtcatccaacgcacgacgggcgcgtaccacgggtggatggccgtcatcctgtcgcgcaggcgtatggccggtcatgcggtgtgccgccgatcggcatggatacctgccgatcaggctcgggaccgtcgaagatatccgaaacacctgatgtacgaacgtaccagcatcagcccgacgctgttgtacagtcgtacaacaatcgttcgcaccgcctgtcagcgatggttttcgaaccatcccgcccagtcgacgacggcctcgatgttgttgccgtccggatccagcacgaatgcggaatagtaccccggatgatacgggcgcggtcccggagcgccgttgtctcggccgccgacggcgagcgccgcggcatggaaaccccgcacggcctcacggttcggggcgaggaacgcgatatgcgtgggcggcggcgcgagcgcggcatcatccagcggggacacgtagaagtcggagtgcggcgtcccgtcatccacgccgaaacccaacgtgggctcgtggtgggccttgacgatgtagccgagtggcgcgagcgcatgctcgtagaaagcgatgctgcgtccgacgtcccgcacatgcaatgtgatgtgatccaacatacctgccactgtacgcgcagcataagccacatgacagcagcattctatccgcttgttatccgatatcatccgcccaaagtcccatctcgggcggagcaaatgggactttgggcggatgatggggcgcttcgcgggatggccgaaacggcggaagacacgacggccatggcaacgggcacggcaaacggccacggcaggcagacacgcggcagccacggaacatgcttctcgccacaccacgcacaaatcatcctgcgggatgccatggcatcgcagcatcatatggcacgatagacacgtaacgacacgcaaaacagatacactgcgcggaaacgactctggagatgagcagatggccggacgacgaacgacacggcgaacgcgatcagtctcgcctcgtgatgggcaaccgccgatccggcatgagctgtcgccgacatggcacgcacgacccgttgcgcgtcgggaacggccgcgtcacggcatgcgacggaccgtgatcatcgtcgcggtgatgctgtgcgcggccatcgccttgttcgcctcgattccacgactgatgcgcttcgtatggcccgcttccggccctgaaccacgccgggcgtcggacgcctactgttccgcgacgctgtcttccggcgacaacaaggaaatgctgtccgttgaacaggcattgaacgccgaaatcatcacgagagcggcagtcaaacggggcctgcccgatcatgccgcgaccgtcgccatcgccacggcgatgcaggagacgcggctgatgaacctgagctacggcgaccgggattccgtgggattgttccagcagcgtcccagtcaggggtggggcgcgaaagagcagctgatggacgagacgtatgcggcgaacaggttctacgacgagctggtcaaggtgccgaactggcagtccgtccccgtcgaggacgcggcgcagtcggtgcagcgttcgcaatatccggacaggtacgccgactggaccaatcttgcgcggacatgggcggcgggtctgaccggcgagaccggcgcgggtgtcgcgtgcgcgctggagccggcgcagccttcggacgcggacatggatggtctgaccagtgatttccgcaacgaattcccgaccgtcatggtatcgcagccgtcgagtctggagccttcctcgaagacgcaggacgacggcggcgacaaggccgccgacaattccgcggccaatgacggctcgggcaagaccacgtccaagacactgacgttcacaatgtcggccggaaccgacaccgaaaacgggaaaaggctatgccgccaagcgacggcctggctggtggtccatgcacggcgctacggcatcgattcgttgcgcgcgaacggcatgcgctggaaccgcacggacggcgtgtgggccggcaccgagaccggagatctcaccatcacggcgacgctggcctgattccggccgctgtcatgacatccacacccgccgcccggctggtataagacacctggttccatctcacggacagcgcgcacagtcaacccgtgcgtgcagctcattcgcacatcgccggcgagtccggcaaagcgagacgctgcgcgacacgcccgaattgcgtagcagaactgcaagcacgcatcccggaaaacggccttgttccgtcattcccgcagaacatgtaagacagtcctgctacacaattcgggcgtgtcgcacgatgaacccccgtcagtcactcactcagcgacccgatttcgccgcgcggatctcatcacataggcaccgatcggaacggtcatcagaccgccgaccacgaacagcagacgtacatcgaccacatcggcgagcgggccgaacacgagcatgcccgcaggcactccgaatgccgagaccgaggtcagcagacccaatactcgcccctgcagggacacgtcgctctccttttgcatgagcgcgtacgtgggcgcggcatgcctgtcagcggaattggagagcacgacgaaaccgaaatcgatgtggcgcacaggggcgtcatccgagctctcccccggatgacgaagacgggcatcatccaaacgaatcagcgcgacgaagcctatgccaacaatcgccgtggacacgtcgacgagcatgatcatccacaatggcatcaggttgacgagggctgcggcgattgcaggagaggcgatgctgatcgccgtctgcaacgtaccgttaatcgcgttgacgcgcagcaaccgcgcctccggaacgatctgcgggatgaacgattgcacggccggggtctggattccgccgcctgccgaacgtatgaccagaacgacaagaatcagcccggtatcaccccagccgacggccatacttgccgacaggcatatggtcacggccgcgatgacggcatcgggaagcatgaccaacagtttgcggttccatctgtcagcccagacacccccgaacacggagacgattgcctgcggcagggcggcggcgaccatcgctacggtcatgaccatgccggagttcgaccgcaagaccaggtaccagagaatagcgtattgcacgacgctggagccgaacagcgacagcgtctgttcgacggtctgccgtccgatacaatgcatcacagggagagccgtccatgtcgttcttgttccgacaccgcgatcctggatcacggcatgtctaccgctacgggccgctgcgcatcacgtgcgtcgacagggacgtgccgatcgacgtgcgcgtcaacgcccatctgatgtacaaggtcgtgctctcttgggaggacaaggcccgatgtgccacgccgttcgacatgatcgcccgtgatctcggcgagttctggctactcgaccagtggtccactggtaggcctgcacggctggatccgttcgccgctcaattacggttcgagcagaaccatcctgcgactgttcaccagcgcattcttccatgccgcccatgcccgcaggccacggtatgtccagctgctcgatgagcaccgacacgccgcccgccaccgggcgcagcccgtcgccgatagactggagcgatgggcaaatcgaagaacaaaccgccgttgcgcgtacgctggaagaccatggaagccgccataggcatggagatccgggagcacaaaggctcgttcgcggtgtatgtcgtgctgcgcgtgctggtgatcgctgtcgcggtgctgaagttcttcaacggcgactatgaggccgtgttcctgtgcatcctgacgttgctgttgctgctggcgcccgcgttcgtccaagtacggttccgcatcgaactgccgtccgcgcttgaggtcatcgtattggtgttcgtgttcgcggctgagatcctgggcgagatcagctcgttctatgagatcttcccgttctgggacacggtgctgcacacgatgaacggcttcctcgcggccgccatcggcttttcgctggtcgacctgctcaaccgttcggaccgtgtgaagttcgagctgtcgccgctgtacctggcgattgtgtcattctgcttctcgatgacgatcggcgtggtttgggagttcttcgaattctcgatggacatgctattcggattcgacatgcagaaggacgccgtcgtgcattcgatcagctcggtgatgctcgatccggcccacgccaatcacgccgttcatatcaacgacatcacgcaggtggcggtcaatgggcgcgacctcggccttggcggctatcttgacatcggcctgatcgacacgatggaggatctcatcgtcaacttcatcggcgcggtcgtgttctccgtcatcgggttcatctatgtgaggaaccgcggcaagggcgtttccgtcatcaaccggttcgtaccccgacgcaaatcccacgaccgcgattacctgcggcttgcgggcggcgacggcgatgcgtcactcgcgccgggagcgcaggctcatcaggcgcaacgccagtcccagcacgatccacaccaccacgatcacccatgatgcgggtttgagcgcggccggggagaacggcagcacctgcaatccgatgatgacgagcccggccgcgatggcgagcacgatgttcgccgtcttcggcttgccggtcttgcggtcgatggacgcgaagctcttgggcagatagccccaccctcgcgactgggcggattatgtgttcgtctacgcgctcgcaggcctgatcggcaccgtgcacgagaccatctgggcatacctgaccaaaggcatgttcgagtaccgcaacggatcgatcctccccccccctcaactacgtgtacggtctccgcgttggccatcgtcatcgtgctgcgccgtatcgaccgggggtggaaggtcgtgctggtcggaggtctcgccggcggcatgctggagttcgcgatgggtctgttccaacagtatctgctgggcagccggtcatggaactatgcgaacgagccgctgaacatcggcgggcgcaccaccgtcccgttcatgctgttctgggggctgttgtgctatctgatcgtccgtttcatcctgccgctcgtcctgtggctcgtgcatctcatcgacgccgttggcgcgctgcccgcgatcttcctgtacgggcagcgcaccaacggcgtggtgttcgacaactggttcgcgcagcatatcaggcggctttcgatgacgacttcatgcgcctgcattccccgaacatgcgcgtgtgagagccaccgcgggccgagcggcaccatatatcggccgcaggctcgttcggcggtgatggcttatgggcgtcacgccaggctggcgcccagttgacggataccttcgagttgggccgcagcggccttacgcttgtcggacgaatcgtcacccatggacaggttgtcgacgtacaccagctcgacgtccttcaccccgcagtacttggcgaaggtctgccggcagatctgattgtccaacgactcgccgatgccgtcggactcataccattgccgcgagccgccggtcagcatgatgacccgcaccgtcttgtccgcgagcgcgccgggggtgccgtccggatgataggcgaacccgcggcagatcacgcggtcgaacagtcccttgaccatcgccggcatcgtataccagtagatcgggaacaccagggcgattacatccgcctgagcgagccggcgctggataggcacgacgtcctcgggcatcggggcatggccgagataatgggcccggtcggccgcagaatacacgggattgaatccttcatcgtacaggtccagcacgtccgccgacgcgccgcgctcgacggcgcccgccgcgaatgccgcacccacggcatccgtcatgctgtccttttcggggttgctggtgatgacaagtatgttgttgctcatgattccattgtcccggaaagctggaccgacgacgcggcgagcgacgtcagatcaagtcgtacggcatctgtctgcggaccagccagaacacgcccatgaccaatatcaccgcgcccgcccacggcacgcgcccgcagaacaccacgcagcatatcgcggcgaaccgcgccgcatagaacgccacgcggcgagcgccgctcctcggcgtggtctcgcaggtcatatgcgtgtagctgccgccgagagtgcggccttgtctgaaccacggaatcacccattcgaacagcaccagcatgaccagcatcgcgatgtccccgaacccgagcgggccgagcagccgcatccgctgcacgtcggcgccaggacggcccgaaaccatcgtgaccagcaccatcgcggcgacgcccacaggagtcgcgcacaccacgaccagtcccatgtcgatgaggaatgccacgaaacgacgcacgaaccccggccgggtgaccgtctgcatatccgtgcgccgcggcgggaacagccggtcgaacagcatggcgcaaccgtatccgatcacggcgcccgacgtgttccatatcagatcatccacgtcaaacagacgatacgagcagggaaacacacccatcacccccgtcagctgcatcgtctcgacaagcagcgacgcgaaaaagccgaccggcagggcgaccgcgaatttccagcggaacacccgtttcatgatgaagccgagagggacgaagaacaccacgttcatcacgatctgcaggatcgccgtcagcccgtcggcgcggatatcaccgatgaactgcagcggattgagctgcggatgcagatggtgggtggcgcagtacgctgcgggatcgtccggcatcggatacagcgtgaagcacagcaggccgatcagatacagcaccgtcgcgtacgccgacagcgccgcaccgaagccgagccggttgtcccggtggtacagcatggccagcacgggcacggtcacgatgaacgacaccagcggccataacgccaccgacatcatgaacggcgccgaaaagctctcgaagaatcccatatcgtctgctccttccctgttggtttcactgtagccgagtcgcaggccgccgggccatccgtcatgagaccgatatggacggcgagcgcttcggccacgacgggcggcattcatcctcaggaaggagaagagaaccgcagaaaagggaagcacgggaaacgcggcgagggccggccggggcccgggcgggtgtcctcctcggccccggcgccccatattgtgacgaccggtcacccgaacacacggcgacgggctacagtggggagtagctacataggcaggaggcgcaatggacattcttttcgtgaccagcgatccggcgttggcttccgcggtgaaaggcacgctggaatccgcccggcacacggtgtctgccgcgtcggatgtcggttcgctcgccggcgcatggccgcacggcacaccaatagatctggtcatcatcgacgacctgtctgcgcatgatctgttggatgagaccagacggagcctgtcccggctcatggacggcaaggccggcgacggcaccggcacggccgtgcggccgcgcacgctgctgctttccactcccccgcgcacgccgaaggcgaacccggacgacacgccgcaggtcagacggcagaccccgttgccgacgatccgcaaaacaggccgggccaaggccgacgggcaggccgcccggccggccgcgcccccatcgtctctggacggcgcttccagcgtcccgcccattcacgcggatgaaacgatcgtcaagccgttctcggacgccgaactgctgtcttacgtgcgcgcgctggaatccggcggagccgcggacgagaccacgctcatccacggcgacctcatgctcgacacgcgcaatcggcaggcgttctatcgcagcggcaagcagccgctggcgctgtctgcgcgcgaatacacgacactggagacgctgatccgggcgaacggcgaattcctcagcttcgacgagctgctggagaaggtctgcggcacgggcatcttcgagcagcgtgacatcatggacggcacgctctactcattgacgcgcaagatgcggcgcatggggttcttcatcacgcagcgggggcatcgttaccgcatccgctgacatcaagccgtcgccggccctccgtcgccgttccgctgccggccgcagccgacagcgttgcacgaaagccggtatcgaaagacaagaaaaggcgcggttcgggcatgcatcgcccgaaccgcgcctttctggtcacatgccggtcatcggtctcgccgacgaccggcacctgtcgacggtcagtccttgtcgatggtcttgcctgcggtggcgccggaggacagatcctggatctcggtgatctcaagcaccgggatggcggcgggcttcttagtgcccttctcctcggcgaccttgacctgagcgtcatagatgtcgtcgtcggtgtgcagggtcacggtgccgcggaagcggtagcccttcttctcggccaggttggcgacggcgacgaccagcgggcggccatcctgcaggttgcggtagtgctggccggcggtgcgctcgtggtaggcgaggtgattgtcgtcgagcacgaacatcgacatcttcgggccgagatcgaggttgccgtccttgtcgacggtggtgatccacgcgaggttgttttcgatgaacgtcttcatgtcggcggtgagcgttgccatagtgcacgatcctttcgtttggtgatggtcacactggttattccatatatcagcctacttcaaacgcctgtggcctcatagcgaaatcagctgactgtgaataatctcacctgcgccgcgcggcatctcagcccttccacgcgcgcaacacggatttcggcacgcgagacgcgtcccagcggtagtggccggtgacgcccatgcggcgcgagaacgcaagataatcgttctcacgccgctgctgattcatattgtgcagcacgtaggagaacccgtcagcgtcccgcttgtcggagatcacgccgatatgcttgacatggtcgaacacgacgatgtcgccctgctgccattgcgcatgatcgttgacatcgttggtgagggtgattccgtatttgccgaagaacacgtcgagcaccccggtacggcgaaagtcgatgttggggtcgggtttggcggccaccgacgcataggacgcgcggtccgcggcgatgtccgcatcgaccatggccttgaggtcgtatcccgcgttccggaaggcgcgccacaccacatcgacgcaggcgccgcggtcggcgggcgggtatccgccctggtagtagccgtcgtcgtatgccgggtgcgccagcgcatccttgcgggccccgcgcatgatgtccgtatagtcgtccacaccgttgccgttgaaatccaccgggctggtcaacatgggatacctgcgccgcgacacgtcgggcggcatcaccgtcgtgtcgggctctcgcgcgtgcgagtacatggacgaggccttcacgccgaacgccttcaccccgctgatgatgccgtcgcggcgcgaccatagccatgaacccgccaaaacggcggacacgatcaggagcgccaccatcgcggcggccaccgcgcggccaaccgcgcgactggccttgcggccatcatcgcgaccgtcctctcggccttcctcgcggccgtttccgccgcttccgcccgcggcattcccgttcgaaacacgatatcgccgaatcataatcgttccgccctccatagtcgtgcgtcccgcatatcccgcgcccggcgtcgcgggcggatggccgcgcgcggcccccggcccgggaatccgggcaaacgacggacgacacgatgcacgcaggcccgcgccgtggctaggatattggatggaatatgttgggtgaagccaccgtcctcatcgcggcccgtcatcgtcttcattatggacggcgtcgagcggcagcgcaagcctgtataaggagaatatgtatgaacatcgtcgaggcaatggagcggcgccacgcggtccgcgatttcagcgaccggcccatcgatgacgatacgcttcgcgcgctgaatgaggccgtggacgcggcgaacgccgacggcgggcttgacgtccagctggtgcaggacgacacggatgcgttcgggggatgcccgacccattatggtcgcttcaagaacgtccgctattgcatcgccctgatcggctccgacgacgaggacccggcacagctggaccgcaaggtcggctattacggcgagcgccttgccctgacggcgacgcagctggggatgggctcaagttgggtggtgttgcacgagacgcacgaccatgacggacgctggcggctaggcgagggcgagcgcatgcccgccgccctggccttggggtatggcaacagaccgggccgggcacatcgcagcaagcctttggaagagctcggggccgtggagaacggcgacctctccggcgctccggattggttcctgtcggggcttcgcgcggtggcgctggctccgagcgcattgggcaagcagccggtgcgcttcaccctgctggaggacggcaagacggttctcgcgcagcctttggagggcgttcaggccgatatctgcctgggcatcgcacggtatcatttcgaggtcggctccggccatactgatatcgtcgtccgctgatttgaccgggccggcatggccgttctcccgaatcagtcgcacgattgtgcagattcagctataaccgtgtaatttttcagcatttttcgccgcaagataagtcaagttcgagaaggaaccgctagcgtcgttcaacatgaagaactttttcaagggaatttcgctgtcgtctatcgcggcaggcgcgttggcggcggtcacctcgttcctgttatcggcgaaaatcggcatcgccggttcggtgatcggcgtggcgatcggttcgattgtgtcggcggtctcgtcacagatctatcagaacgtactgcacgaatccggccggaaactgcaggatgtcgcggggacgacgggcgacgaggacgacggcgctacggagactgcggctgatacggatacaaccgcttccaccgacgccaatgcgcaggaccatacagcgatcatcgccaatccggtggcgctgccggcccccgcatcacacgagctcggtcacggtccgcggaccgtcgcctcggacgccgcacggcggctgtcgcacggcgatgagacgcaactgatcggcaacgccccggtggacgccgatgcgacgattgcgagcgggatgccccccgtgccggcgccaccgtcctcggcccgcgccgccacgccaagcggcatgcgcacgtccgcccggcctgccgcagccagattcacggcctccaggtccgctaccttcaggtcagaggccgatcgagcgaagcgcaacaagcgcaccgccatcatcgtcgccgtcatcagcgccctggtggcggtaggcgcgaccgccggcgtcatcctcgccatcacccaaggtcagggaaccgatactgtggtccgcgactgggtgcgccagtcgaacaccccgaccgaacccaagcagcaggcaccgcaggacgacacgaccgacggcaacagcgacaccaaggattcgacaacgaaggacggcaccgattcgaccggcaagggctcgacgggcgacagcaacagctcgaccaacagtggcaatggatcgaccgattccactcagggcaacggttctgactcctcctcgtcgaacgggtcttccagctccaacggatcaaatggctcgaacgggagcaacggctccgactccaccggaaccggcaacggaaactcctcaggctccgactcctccgggtcgggctcaggcagcaacggaaccggcaacggatcgggccactccggctccgacggagcaagctccaactccggttccaatggttccggttccgactccggctcctcgtcgagcgggtcgtcgtcgggatccggatcgggttcttcctccggtggcggctccaccggcaccggcaagtccggcaaccaggcgtgacatcaagcagtccactcgtatccggccgcttatcccgcggaagtcccaccagaacagccatatgggactttcgccggataagcggcccaccggccacgttccccacacccatatgtcgccccttatccgacgaaagtcccatttagccgtcctcagatgggactttgggcgggtgagacggatgacgcgggtgacggaggctgtacgacacgcccagtttggttttcataccgacttgaggtaaattatcaatcggctcaaaaagcagctgataaatgaatttggggctatggcgcagctggtagcgcatctccatggcatggagagggtcaggggttcgaatccccttagctccacagattgaaaccggtcgatttcgaccggttttttcgtttacgcacgctctccggcaggcaaccaaaagaaaacgctccgctttctcgctttcgaggggttgattccacactcaaggaacatctatctgcgtttcagggggttgccagattgcgatatccggagtattccggccggattgccattgaagtcatgcggttcctggagcttggatacttggccggcaaccccttgaaacgcagatagatgtttcagcgtcaccgaatcaaccccttgaaagcgagataggcatccattcaccgaggaatcggcggatgaccgtcagtcgccgtgctgcacgtgcatgagcaccgtgccgtccgagccgctgacgaccgcatgaggtgccgggtcgagcgacagctcgacatgcaaacgttctccgccatggccgaccgcatcataggcgtaccgcctgttgtcgaccgtcaccggcgtcgtcatggcgtgggtgagccacggattgcgccggcggatgccgatcagcccttggatcaggcgatacatccactcccccgtgccaggcaaatcatccggcgatggggggaacgccggccgcaccgcgtcatcgccgcccatgcggtcctccttgacgccgcgaaacgcctgctcgtcgccgtaatagatgctcggcacgccgccgacggtgaacagcacggtcatcgcaagggaggctccggcatctcctacacgactggcaatgcgtgtcacgtcatggttgccgacgaacgtctgcggcgcgaacgactccagaaactcattgtgccgtttgaggctccaatccagttcatagaagttcgcggattcgagcgaactccaaatcgccttccacagctcgtactgggtgagtgaatccatgccggattgccggacaatcgcggggtaatcgccatgaatcacctcgcccatgatccacacgtcagggaattcgcgccgcacggcgggcagaacacgcgtccagaacgccggcgacacggcgtaggcggcgtccagccgccatgcggaggctccacgccgcagccaatgcaacatcacatcggtgacgagccgcacgacctcttccgagtcatgattgagttccggcagttcggggtgcccctcgaaccggcgatagtccactcccccgcctgcatttcgcgtgatgtggaacatcgactcgtggccgtggccggcgagcgcgtccctaaacgccgggaacgagcgcccaacatggttgaacacgccgtcgagcatcacgcggatgccccggctacggcatgcatcgatcagcctgtcgaacgcggcgtcatcgccgagccgagaatcgatgcgatagtagtcgaccgtgtcgtacccgtgggtctcggacgcgaacaccggccccagcagtaggccgttcgcgcccatgtcgatgagatagtcaagccacgggatgatggcgtcgagtcgtggcgtcaacgcccgctcgccctcgttggacgggcgtatcggggcaccggtgaatcccagcggatacacctgccaccagatggtcgtgtcgttgacgctcatgccatagccgctcatcgcattctcctcatccggcacacccgttcccgtttcccgtgaccgggtgtgccgcagcgatcatctggccgggaaatccgggtatccgtccccgtcgaggtcgggtccgtccgggccgccgtagtagccatcgccggtgcccatgaactcgcgggtgctgacgcggttgacattgcgggcggcatccaccgcgtgctgcagttccttgcgcacggcgaaaccgtcgatgatgttcttcagcacgatcttgccgccggtggactggtccatcgcgtcgatgagaatcgtgctcaagccgaagatgcgctgcagcagcgtgcgcgagatcgtgatgtcgacgatgcggaacagcttgacggtgtcgaagctctgatgcagcagaccgctctgcgtggccagctcgtcggccgtcagagtgtacgtggtgaacgtgaacggggtgcggcaccagttgcgcttgcgctgcgtccagatgatgtcgccgtctgcaatgttcttggccatgatcggtctcctcctgctgtcgatgacggtatgcttccatcgtaacccgtcattcgggacgcgatgtgtcctctgccagcgtacagggaacggcggatagagggacggacggggagaacgcagcatcaggagcctgctatagggccggatgctcccactggtcggtgtcggcgagcgccggaccatgattgtagtcgacgagccgccaccgcaacgtgccgtcgggcatgtcggctgcgacgaaccgcacccagtgcgcgttgcccatgctgaccacgtcggcgaaatcggggtggatagcccccaatcccagcacggtctgcacggtctgcgcgatccatgagccatgcgagaacacgtacagatccgtgtcggctccggcgctgaacgaccattcctccaatgccgcgcggcctcgctcgccgacggcggccttcgtctcggcaccatgccgcagttcgccaccgcgatattccgcccatgcacggtagtcctcagggcattcgcgctccagttcggccagctccttgccttcccattcgccgaagttgcgctcccgcacgcgggcgtcggggtgcacgaccagtccgagcgggtcggcgaaggcgtgcgccgtggccatggcacgactcaggtcggatgccacgacgagctgccggcgttccgggtgcgattcgacgtatagggagcgcagtgcctgcgcggtctgcctgacctgccattcgccgatctcatccaaggggatgtcaatctgcccctggaagcaatgccgggcgttgtatgaggtgcgcccatgccgtatcagcgtgatggagcggacgtgctccggcatcgcctgcggcgaggagacatcactcatcagcttcgccggcatcgtcaccgtcactgccgttgtcggcggattcgtcgcccgtcgtctcggggtgttcgagaggcagctcgacgacggggcagtcacgccacagccgttcgaggcgatagtactctcgcgcgtcctgatgcatgatgtggatgatgaaatcgccgtagtccagcagcacccactgtccttcgtcgacgccttcgcgcgagcgcggggacagatgcccgcacttgaggtacacgtccttctcgacctcttccgcgacgccgatcacctggcgctcgttcatggcggtggcgaccatcatgatgtcggtgatggcgagcaggttgctgacatcgaacgcctcgatgtcagcggctttcatgcggtcggccgcgactgcggcgacgcgcacggcatcaatggaactctggactgctgtcattggatcaacgctcccaagcgggcttccagccctcgacgatgtgttgtgtgttttcggaatagaccatcgaatcgtccggcacggcgtggcggatgaccgaaccggcaccggtggtgacgccgtcgccgacctcaaccggcgcgacgaacaggttgccggcgccgacgtgcacgttcgagccgatgtgcgtgcggttcttgtgcacgccgtcatagttggcggtgatcgtaccaccgccgatgttggtgtgctcgccgagttcggcgtcgcccacataactcagatgcggcaccttggtgccgttgccgatgtgcgccttcttcatctcgacgaacgcgccggccttggtctcctcacccagctcgttgcctggccgcatgtaggtccacgggccgatattcgcggcacgcccgatatgcgagccctgcacgcgggagcgttcgacgacggcctcggcgtccacggtcgcgtcgatcaacgttgtgtatgggcccacgaccgcgttctgaccgatcacggtgtggcctttgaggaacgatccgggcagcacggtcacgtcctgcgcgagttcgacgtcgtcttcgatccacgtggtgtcggggtcgaggatcgtcacgccgttgagcatccagtgctcgcatacgcgacggttgtgcgccttcgacagcgcggcgagctgcaggcggtcgttcacgccttcgacgctcagcgggtcgggcgcggcgaacgccccgaccgtgccgcgcgtcttcgcggtctccagcgcgtcggtgagatagaactcgccctgcgcgttgtggttgtcgaggttcgcgatggcctcggcaagcagatcggcgtcgaacacgtacacggacgtgttcacctcctgcaccgcgagttcgctccggttggcgtccttctgctcgacgatgcgcagcacgtggccgtcacggtcgcggatgatgcggccgtatccggtcgggttgtcgaggatcgtggtcagcacggtggcgccgtcgccgctctgctcgtggaacgccacgagcttcttcaacgtgacggagtcgagcagtggcatgtcggacgcggcgatcagcaccgagccatgcaggttgcgttcctgggtcagctgcgccatcgcgcactggaccgcgcggccggtgccggggatgtcgtcctggttgacgatgtcgacgttcgcgtcgtaggaccgtgccgcctcggagacgcggtcagcctgatagtgcacgacgacggccagcgtctcgggctccagctgtccgaccgatgccatgacgcgctggaggaaggtcttgcccgcgaattcgtgcaggaccttcggcttggacgaacgcatgcgtgttccctcacctgcggcgaggatgattgcggcggatagtgccatttcggtgcgactccagttctctgccgactgcaggattgctgcccggccgcggattgccgcggaaccgggcgcgaaagttcccccacctggactcgaaccaagacaaagggttccaaagacccgtgtgctgccattacaccatgggggaatggcggtgaacccgccaagtttttattatgccatacctcgcgacttcgtcaaatcgaagctcatgcgaacaggaagccctgcccgtggtgctcggggtacgtgtcgaagagctccgcgacggaaccgtcctcgaacaccgcgcggatggcgctggcgagcagaggcgcgatcgacagcacggtcaggccgtcccagcgcttctcttcgggaatcggcaccgtgtcggtgagcacgatctcgctggcgccgcagttcttgagacggtccacggccggaccggacagcacgccgtgcgtagcgaccacggtcacggacttggcgcccgcgtcacgcagcacgtggcaggctccggcgatggtgccggcggtgtcgatcaggtcgtcgacgagcacgcagtccttgcccttgacatcgccgaccacacggttggcgaccgccttgttcgggcgcgtgatgtcacgcgtcttgtgcacgaaggcgagcgggccgccgccgaggcgttgcgcccactgctcggccacgcggatgcggccggcatccggggagacgaccgcgacgttgcccagctcgttggagaaccgatcgcggatgtagtccaccagcaccggcatagcgatcaggtggtcgaccgggccgtcgaagaagccctgggactgcgcggcgtgcaggtcgacgctcataatgcggtcggcaccggcggtcttgagcaggtcgaagatcagacggcaggagatgggctcgcgtccgcgatgcttcttgtcctgacgggagtagcccagcagcgggcataccgcggtgatggaacgcgcggaggcacgcttcaacgcatcgatcatgatgagctgttccattatcgacttgttgaccagatccgcgtgggtctgcagcacgaacacgtccgcgccgcgcaccgattcggtgtagcgcacgtacatctcgccgttggcgaaatcgtatgcggtggtctccagtatgtcgatgccaagctgttcggcgacgtccgaggcaagcttcggatgcgtacggccggtcacgaggatgaggtttttatcgggctttccttcgaggattgcactcaccatgtctccaaacgtttgtgtttcgctgaagtggacaatgtcatagtaaccgtgcacaccgaccgcatgtcacatgcaggccagccccggttcatgttccgttagcgttcccggcacgactcgccggcgtgtcccggtcagccggaacgcctgcggtacaggccgtgcttgccgatgtactgcacgacgccgtcagggacgaggtaccataccggctcgccgtgcgtcgcgcgccggcgcacatcggtggaggatatggccagcgccgggatctccagcgtgtccaccttgccgtcgggcagccgcaccccctgtggcgacgagtagccgggccgtgtgaccgctacgaaatgcgccagatcccacatctggtcggcgtccttccactccatgatctccgccaccgcgtcggcgccggtgatgaagaacagctcggcgtcgggatgctgcgagcgcaggtcgcgcagcgtatcgatggtgtaggtgacgcccggccggtcgatgtcgacgcgggacacggtgaatttcgggttcgacgcggtggcgatcaccgtcatcagataacggtcctcggcgttggtgacctgcttgtcgagcttgaagaccggccggccggtcggcacgaaaatcacctcgtcgaggtcatacacccaggccacctccgaggcggcgaccaggtggccgttgtggatcgggtcgaaggttccgcccatgatgccgacgcgcgggcgcatgtgccagttgccgcgcgtggagaaccgcttggctccgtccggtttttcggatgacaggtccgacatgcggcgctccggctcgacgagatattggatttcgggcgaggggtcggcttctgcggccaatgggcttgcctcctgcggcggccttcgcgtcgtcatgcctccgagacctccggctggctgtccgcctcgtccgtctcgcgcttgccctggtccgcggtggtgttggcctcctgcgggtcgatcttgcccatgtcctcgtcccattcgtcctgcacgacgcggcggatctcggcgaacgtgggcagggggaagccaggctggtacaacctgcgcacttcggcgacgcgctcggtgatacggatcagcgtgtcggtcatgccgtcgacgtcgcccttgcgttccatggcgctgaagcggcggatgtactgctccatcatgcccatctgttcgcgcaccgtcttcagcttcgccgcgtccagttccacgacttccggggagtcggtctccggccagccgatgagcacggcgtcggcatattccagcgatgcccgctggctggccgaggcgatgccatcctcgatctgcaccaggaacacgtagcggacgatgctgagccgttccgcggcaatcttcaggcccaatgtctggtcgttgagatcgatatcgtcccgtatggtggaaatcaccggtcgttcctcgctcatgctcgcacctgccccgttccgtagccgatccacttcgtggtggtcatctctttgagtcccatcgggccgcgggcgtgcatcttctgcgtggagatgccgagctccgcgccgaagccgaacacccctccgtcggtgaaacgggtggaggcgttgaccatgacgacggccgagtcgatgcgcttggcgaacgtttctatcgcggaatagtcctcggagatgatcgactcggtgtggccggtggaatgcatgttgatgctgtcgatggcctcgtcgagcgaatcgacgacctcgacccccatggtgagcgccagatattcggtgtcccaatcctggtccgtggcgtgcttcatggcgaggcttgggatgccggccgcctcgatgatggcgaacgcccgctcgtcggcgtgcagctcgacacccttgtcggcgagcgccttcgccgcggccggcaggaaccgttcggccacgtcgcggtggaccagcagcttttcggcggcgttgcatacgccgacgcgctgcgtcttcgcgttgatgatgatggggatcgccttgtcgaggtcgccgctgcggtcgacatagatatggacgttgccggctccggtctcgatgaccggcactttggaattgcgtacgacagcctggatgagtccggctccgccgcgcgggatcaacacgtcgatgtggccgcgtgcctccatcatcgccgtggcgccctcgcgtccgtattcgtcgacggtgtcgatcagcgacgggtcgaatccgttcgcgacgagcacgtcgtggatcaccgccagtgtcgccgcgttcgtgcgctctgcgtcgtgccctccgcgcagtatagcggcgttgccggatttgaggcacaggctggccacatccacggtcacgttcggccgggcttcgtagatcatgccgataacgccgatgggcacgtgcacctgattgagccgcagcccgttctccagcgtgtatccgcgctcgatctcgccgaccggatcgggcagcgaggccacgtggcgaacgccttcggcgctggcggcgatgcgcggctcgtcgaaccgaagacggtcgagcttcccggcgtccatgccgcgagcggctgcggcctgcatgtcctgcccgttggcggcggcgatggtcgaggcgtcggcgtccagcgcatcggcgatcgcgtgcagcagggcgtttttcacctgggtgtcggcctgcgccagatcagattgggcgcgtgcggcggcgtcggctttcgcgcagacgccggagaacacctcgccgttcaattcatctttcgtcataaagcccagaataacgcagattgcgagctttgcggggcattcgtgtcatcatgtcaatataggagcacgtgtcctgcggccgcgacgcacgccggggtccatgccagtatgcggtacccgccgccgccatgcccacgcctgacggtagacttgagccgaacttcatcccattcagcagcaacgcaaggattaccagtgaccacgttccacagcacgcgcagcaccaccgactcacttacctccaagcaggccatccgcaagggcatcgccgacgacggcggcctgttcgtgaccgattccctgggcgagacgaaggtggacatcgcttccctgacaggcaagccgtatcagcagatcgccgccgaggtgctcggtgcgctgctgccggacttcaccgaggccgagctcgcgcagtgcatcgccgacgcttacggcgagcagtggtccgacaggcgcatcacgcccctgaagccgctcggcgacgactacatcctcgaactgttcaacggcccgacctccgcattcaaggacgttgcgctgcagatcctcccccgtttcatggcgcacacgacgccggcggacggcgacaccgacgagaagatcatgatcctgaccgccacatccggcgacaccggcaaggccgcgctggccggattcgcagacgcgcccggcaccgcgatcaccgtcttctacccgcagggcaaggtgagccaggttcaggagctgcagatgagcacgcaggccggcgcgaacgtgaacgtgtgcgcggtcgagggcaacttcgacgacgcgcagtccgccgtcaagcgcatcttcggcgacaaggagctcgccgcgaagctcgccgccgactcgcacgtcgtgctctcctccgcgaactccatcaatgtgggccgtctcgtaccgcaggtcgtctactacttctccgcttacgcgcagctgctggagaaccaagtcatcaacgtgggcgacgaggtcgagttcgtcgttccgaccggcaacttcggcgacatcctcgccggctactacgcgaagatgctcggtctgccggtcaagcacctcgtggtcgcctccgacaagaacaacgtgctgttcgacttcctgaccaccggcacgtacaaccgtcagcgtccgttcttccagacgatcagcccgtcgatggacatcctcatctcctcgaacctggagcgcatgctgtactacatgtccgaaggcgacacccgtctgatctccatgctgatgaatgacctcagccagtggggcacgtacgaggttccggagccgctgctcgcgaagatccgccagctgttcggctgcggctgggccgacgagaaccaggtgcgtgagatgatcgccgactgctggaagaagaaccgctacgtgatcgacccgcacacggcgtgcgcgtacttcgtggctcagcaaatgccgcgcgacccgttgaccccgcgcgtgatcctgtcgactgcgagcccctacaagttcccgcgcgtggtcaacgaggcactgggcctggatgccgacggcaccgatttcgaatgcatggatgtgctgtctcgcgagaccggcaccaccgctccggccgccctgcgtggacttgagaccgccgatgtacgtttcaaggacgtcgtgcccatcgacggcatggaggattacgtcgaaaaggccgcccaggcgctgtaacagctcagcccgccagcaggggcataaaggggcttacagctctttggcgcggtagaagcggatggccagagcggcggagatgcagtagacgcccacgcacagcacgacggcaatcagagcggcacgccaccatacgctcatgaaatccgcgacgccttgcagcacgccctgccaatcaaacggcaatctggacagcaacgcgacgagtgcatacagcccgactatgaccacaacgaatatccgcatcatcgcccggaacgtgaaccggtacgaaaacgccatcagaatcgatccgacgatcagggagaacgcgaagatgacggcgctcggtatcatggcaccggcccagccggaatccatcatgtcgccgaaggcgaagaagacgctgcatgccatcacgtccacggtccacatcgcgcaggtcaccagcagaaacaggaaccgtccggccacctgcgacgtacgggcgatgggaatcatcccgttcatggtccgatgaccgccgctctcctccgcaacattcacgctcaaggcggacatccacgacatcaccgcagccatgccgcatacgccgccgtagacgctgacggcgacctgtccgggcgcgccggtcacggtcagcaccagcgcggccacgcaggacagcacgggaaacagcaacatgaacagcatgttggacaacccgaacaaatccactcgcacgcaatcgaacctgcactgcctcactacggaactccagcgcatctcaccactcctttgccttgtcatctcaccactcctttgccttgtacacgcgcacggcgatcgcatacgagaccgcatacgccgcggcggagaccgcgaccagcatcgcggacagccagaaacgatgcgagacgacggcgtccaccacgcccatcaccttggcgatcatcgatacggggaggactgacgggatgaacgtcccgatcaacgtgacgacatagaacaccctcaccgtgatctgcagtccgatgatgttgtcccacaaacaggaaacgggcatgatcaccgcaataatcagcacgatggccagaccgcccacgccggccacccacagattgcccgtgaatgaccaatcacggcggacaagcggctgcaccccatcgatcaatgcaatcaccacggccccgtacacggccagagccagtcccatcaagtaccgcgaggccatctggttccgccgcgatgcgggcaccaacccgcgcagccgatacccgctctgcatgtcgatgagcggcacggtcagcaccatcatggcgggcgagaacaccgccatgacgacgcccaaccggaaaccgaagccgtcgacgaacgccccgccgttgaacatgatcgaaaacaccggtgcgagcagcaccgaggcgaatgattgcatggcgccgtcgcccagcagatacgccaggtccagatgcaatgcggtcgccagcccacgatttccccgccgtgcccgcacggcacgggatggcacggtctcagtcaacgttcccatggccgacctccttgagtgcagacgcgacctcgggcgaagacgcgacggaatcacggacgttggtcaggcggatgatatcgtcgatggaggccggctcgacgacgatatcggcgacggctgcgctgacggtgccgaggctgtcggagcgcaccagtgcatcgaaaccggtctggtatgtgtgcgagccaagcaccacgccggcaggcagctgggccaactcgcccggcccgcccttgactatacggaacgattcctcgaattcgtccttcggcccggtgtagtagagccttccaccagtgatgtaggtgatgaagtcggccgcacgttcgaggtcgacggtgatatgggtgctgaacagcaccgaatgctcgccgtcctcgatgtaggcgtgcagcatgtccatgagttcgtcgcgggcgagcacgtcgagtccgctggtcggctcgtcgaggatgagcagtttggcgtcatggctcaacgcgatggcgagcatcagcttcatctgcatgcccctcgaaaggtccttgatcttcttcttgccgttctgagctcccccgagaccgaaatcgtccaggtaccgccgataccgatccccgttccatgccgggtagagcggggcgacgatgcgctcgaccttcgagaccttccactgttcgtacaggtagctggagtcgaacacgacgcccagctgttccttgacggcctcctcgtcaatgatgttgtcgaggccgagcacctggatgctgccgtggtcccgtcggatcatgttgaggatcagcttgatcagcgtggattttccggcgccgttcgggccgatcagccccatgatgtagcccttgggcaggtcgaaggtcacgtcgtccagcacgaagccggagtcgtagtgcttggtgacgccggtgaccgcaagggccatcgtgtcgggttcggatatggtggtcatggctatggtccttttttgggaaattctctcgtcccgtggcctcgcgtatcacagcgacgccacggtgttcgcaggttgccggccaatgccggcactcactgcttgcggtactcgtcttcgagcatgcggcccagttcactcagcgcgatgtcggcggctttggctgcgcgtatcgcctcggccaggttttcgcggacctgggtttcgagctgacgtcgcatcagctcgttgcccttgtccatcacgaaggtgcctttgccctggaggttctgcaccacgccctcatcggccagttcgttgtacgccctggtgacggtgagcacggagacgcgcagttccttggcgagtttgcgcagcgagggcaaggcctcccctgcctcaagctcgccgctcatcacggcgctgcgaatctggttcttgatttgctcgtagatgggttctccggacacggatgagatgatcagtttcatctatgcccctttccatgtgtctccagtatcacagccggattactgttctactgttacatataacagtagaacacttatggacaactgtcaaggtcgagagcataacagtggcgcgtcggttcacagactgtgcggcgcctcgctgaaatcaaacagcacgccgtcggcgagaccgcagatatccggccagtccccgtcagaagaatcatcatggatcgcccatacccgcatgccgacggacttggcggaccgcatcgccaccagcagatcctcgaacaccgtgcactgctccggcaccacgcccagacggccggcggccagaaggaacacgtcgggacggtccttgccgacattgttcgcatcgtcgacgctgacaatctggtcgaaatagtcgaaaatgccgacgtgcttcatcgccggctcgcgcaacgccggcggcagggacgtggcgacggccagcttcgcacccgaccgcttgagatacgacaggtattcgaccgcatgcggcttggcctccaccaccgtcgaataggcgacgcgcgccatgtcatcccactcctgcatcagcgcctcgggcgtgtcaggcaggccgaaccgggcgatcgtgtattcggcgatctgccggaactgcatcgccgccaccttgcccatgtagtcggcagggacctcgatgccccgtttggagaggaaatcgatgtcgacctgatcccatacgcccatagaatccagcaacgttccgtcaagatcgaagattgccgccttgccgtggttgtcgtccatgatgttccttccgctattgccggttatccggtccgtacgtgcgcgctggccgtcccggctatgtcagcgacgatgatgccaacagttcgcgtgcgtggtcgagcgacgcctcggattcgctgccggacagcatccgggcgatctcatgggcgcgcgcgtcgccgcgcacctcggcgaccgtggtcgtcaccgcggactgcccgccgtccgaggcgcccttggtcacgacgaactgcgcgtccgcccatgaggccacctgagccaggtgcgtgacaacgatgacctgcgaggtccgcgcgagacgggcgagacgccgccccagctccactgcggccttgccgccgacaccggcgtcgacctcgtcgaagatgaatgtcatcggcccgccctcgcccgcgggagccgcactcgaacgccgatccgcggcggcgagctccaatgcgagcatcaggcggctcagctcaccgccggaagcgcttttgcccatcggcagctgcggggatccagggaacggcgtgaacaggaattcgatgtcatcgcgaccgttcgcgtccagcggccatgtcgaggcctcgccggcagaatcggatacgggtaccgcctcttccccgcgatccgtgacgcggatatcgagccgcgccccggccatggccagcgacgacagctcgtcggtgacggtggcggccagcgactgcgccgcggcccgtcgcgcctcgctcagcgccccggcatcctgcagggcccggtcgaatgcggcttcgcgctcgtcctgcagctgggcgaccttctcaggagacgcgtccagatcctcgacctcgaacgtcgccttgtcgcgccacgcaatcacgtcctgcagcgtcggcccccagcgccgggtcagctcgcccagctcgtggatgcgcgcgttgatggcatccaggtcctcgacgctctcctcgccgtcaagctcacgcgacagcgagaacacgatgtccgacagatccgcgttcagggattccagacggtcagccaattcatcgaaatcaccgtcgacacggatgtcgcgcaatgaggagatcgcctgattcagcagatcagacgcgctcgatgaatcggcgtcgacatccacctgggaggcgtcaagcgccgcaagcgcccggctgacaccctgcgcgatatcggcggcgttctcgatgcgggcgcgacggcctttgagctcctcgtcctcgccgggctggggatcggcgcggttgatgcgctggatggattcgcgcagatagtccgcacgctgtctggcggacgactcctgatggcgcagtcgttccagacggtcatcaagatcgcgcagagcatcccatgaatgacggtaccgcgccagcagatcatcatcgccggcgaccatgtcaaggaactccctctgcctggatgcggcggcgatgcgcaactggtcggcctgcccgtgaatcgtcaccaactgcgacgccagtgattccaagaccgagcggggggcgctcttgccgttcagcacggcacgggaccgacccgacaccggcaccgtgcgcgacaagtacaactccccgtcctccagcacggccccggcatcgcgggcctcctgcgccacgccaccgccgtcatccacggcgaacacgccttgcgcccatgcctccgaagcgcccggggacacgcgcccgctgctggccggtccgccggaaatcagccggatggcgctcaacagcatggacttgcccgctccggtctcgccggtgatcgcggtcattcccccggccggcgtgagcagggcacgatgaatcgggccgaggtcatgaatttccagttcctcaagcatggtcggccccctgctcgccggaagaaggcaccgcggccgtgtccgccgcaccccttgcacgcgtgcgctgcgccgaggaaccaccgttcctcgcgtgctcgcgccatccgaccaccggcagatcgaatttggtgaccagacggttcgtgaacggcacaccggacagccgggccagccgcaacgtgctcttcgactcgcgcacctcgacgcgggtccccttcggcagggcgcactgccgtcgtccgtcgcaacagatccagccttcggacgacgaatcgtcgaggatgtccagagtgaacgtcgagccggcgccgatgatcagcgggcgggcgaacagagcatgcgccgccagcggcaccagctgcagcgccttgacgttcggccacatgatcggccctcccgcggagaacgcgtatgcggtggatccggtcggcgtcgacacgatgacgccgtcacaaccgaacgaactcatctccacatcgtccacccggatcgacagctcgaccatcttgccacggtcggcgcgctccaaggtgatgtcgttcagcgcccagtcctgcagcggctcatgcgcacccggcagccacacatctacatgggcgatcatgcgctcgtcaatcgaatagtcatggtcggcgacgcgccggatcgcctcgctcatctggaaactctcgaattcggccagaaaaccgacatgacccatgttcacgccgagaatcggcacctgcgtgcaatgcaccagttcagcggcccgcagtatcgtgccgtcgccgccaagcaccacgacgatctcggtgtcctcgtcgaccttgtgggtcacgccgccgaactgcggcgcctcgacgttgtcgatgatcgacacctcgaacccgacgctgcgcagccggtcgaccgcctcggacaccaccgtgccgctttcgcgcagacgcgaatgcgtcaccaccactgcatgccgagcgcagaccatcgcacacctcatcatcatccgaaacgaccacgtactgtcatccacaatatcccataaggcgccacgaaccgcttatccgccgaaaacgaaacgcaagcgccgccggcggcgcgtccatgaagaccgatccggggccgggcgggcccgcgcccgcgatgcggacgacggcggcatcagcgccaaagaatactagaatggcgagtgcaaccagtctgttgccgcgcttgacgcgcgccgacgcatacgaaggagcggggaccatgtcaaatctcgtttttgacgagtcctcagcgaaccgcgaggcatcgcacggctacgcgtggtggttctccggcgacacgttcgagaaggccgccgccgaggagcgcacccgcaggaaacgcagcttcattcaccatctcacctcgcatcccggccgtctgaccatcatctacttcctgctgctggtggccctgtccaccagtctgttgctgctgccggtctcctcacacgaagaggagccgaccagcttctccaccgcgttcttcaccgccgtgtccgcactgtcgacatgcggcatctccatcgtgaacgcgaccacgcattggaccgcgttcggccaggtggtgctgctggtgtcggtgcagatgggcggcttgggcgtcatgacgttcgcatcgctgatcgccctggccgccaaccatcacatgaaagccacgcagaggctgctcaccgccaacgagctcggcaccacgaaactcaacgagatccgcggcgtgctcaccgtggtcatcaccaccacgttcatcatcgagtccgtcacgttcctcgccctgttccccggcctgtacggcatcaacaggggcaatgtccgccataccgcctgggaggcgctgttcttcgcggtcatgtcatacaacaacgccggcttcacgccggacggcgccggcctgcacgtcaacaactgggcggtcggcatgccgatcatggccagcgcgttctgcggcacgctggggtttcccgtgctgctcaacctcatgcgctgcgcccgccaccgcactcccccacgccgttggagcctgcacaccaagatcaccttggtgacgacgttctcgctggtgctgctgtcgctggcgtggttcctgctggtggaatgggacaacccgttcctgttcaagggcgccgacgtggagacgcggctgcgttacggggtcgtcgcggcggtaatgccgcgcagctccggcttcgacctgagctgggtgccgcaggtgagcgagccgacgaaggtgttcatgagcgtcatcatgttcatcggcggcggcagcacctccacggccggcggcatccgcgtcacgacgctcgcggtcatcctactgatctgccgtgccgcgttcaccggacacaccgacatcaacgccttccggcgccggattccgacgcgcgtggcgatgaccgcggtgagcatcaccgccgcatgcctgttcctagtgctgagcgcgtcgctggcgttgatgctcgcctcggactgctcgctcaccgatgccctgttcgacgcctgttcgtcgttcgggctcggcggctattcggtcggcgtggcgcgcgaggacaatccagcggcgttgttcatcctcgccacggcgatggtggtgggtcgtctcggtccgatgacgatcgcatacgcgatcaacaggccccgcgccttggaatcgatacgataccccaacgagcccatcgtggtcggctgagggcgccgccgataccgtctgcatccgacggatgccgccgactccgcctttgtcggacgggcagggatggccatatcatgacgtagaagcggtaccgttcaccgccgcccggagaatcggcggcgtccatgacggcggcaccggcgcatcgccgcgcacggcggcggaaaggatgatggcatggcacgcaacaacaggagcattctggtcgtcggactgggacgattcggcagttcggtggcgaccacgttggattccatggggcaggacgtgctcgccgtcgacaaggatcccgaactggtcaacaggtggtccgcgcaggttcccaccgttcaggccgacatgaccgacgtgctcgccgtcgagcagctcaatgcgtccgatttcgacaccgccgtcgtcgcaatcggagacagcgtcgaggcgtcggtgatcaccgccggaaacctgctggacgccggcatcagcgacatctgggcgaaatcggtgtcgaaggagcacgcgcgcatcctgcagcgcatcggagcgcgtcacatcatcaacgccgaaacggatgcaggcaagcgcgtcgggcatctggtgtccggaaactatctggattacatcgagatcgagggctcgcacaccgtcgtcaagatccacacgccttcgcacgtggtcggctattccatcgcggacgcgaaggtcaacgaacgctacggcgtcaccgtcgtcggcatcaaggcgcccggcagcgagtttcagtacggttccaaggaactggtcatgcaccgcaacgacgaactcgtcatcatgggcaagcaggacaacatcgacaagttcattcgcggctgaccgacgccaggcatcccctccatacccccgtatgaccacatactgaacgcaggcacgtgccgcaccgccatccaattggtacagtcaaaaaggtgttgcggcacagtcgtcgcaacgtaacgacatggcggcggcgagggtggcgcaatgggcaatatcacgatggttgacgggcatgtgcccgacggctcgtatcaaaacgtgacgacgaatggaagctgctcctgcgatgccggcatgcgattcgacggtttgcgtgcccgcggctcgttcgatgcgatggggctcgacggcgggaacgtgcattgcgaggggcgtctggtctgccgcggcgacatgcatgtcaacagaatcagcgggcatggcgaactgcatgtcggaggcgacctgcgttgctccgctctggatttcaccggcaagatcatcgtgcagggcgatgtcatgtgccctggcggcatgaccgttcgcggactgctgcgcaaccgttcatgcatcgtcacgagatacctggatatgcagggcacgttggacgcggacgagctgcgcaccgaacggctgcggatgactcccctgtcaagcgccatgttcgggcgcagcggcatgacggaattcacccggacgagcaacgccgaacgaatcatcggcggcgatttgcgtgtcagcaggctcatctgcaccctgatgcagggcgtcttcatacggttgactgacgaatcgcatgtggaacgcgcctcgtgcatcacgaagctcgccatggacagcacgtccagcgtattgctggtatccggcgccgccaagcgtgtgtatctgcgcaatacgtgacacggacgacgaatccgcgcgcgatgcggcgtttttcagtcggcctttgcggcgatgtcatccatgcgggcgaacagcaggaactccgtgttcccgtgggtgccctcgatcggtgacggggcggttcccgcaaccgtcaacccatgctggttcgcgcaatcgacgaccgtctccagcgcctgatcgcgcagatgccggtcctccacgataccgcccttgccgagattgcccttgcccacttcgaactgcggtttgacgagcagcaccactgaggctccgggcgcggcgatgcgcgcaatgaccgggatgacgtatgtcagggagatgaaggacacgtccgacacgatcatgtccggccgatacggcagattcgcggcggtcacgtcgcggatgttgaccccgctcatctcgatgatgcgcgggtcgcgcgcgatacgactatcgagctgaccatgccccacatccagggcgatgacctgagcggctcccctgcgcagcagcacgtcgcagaagccgccggtcgaggcgccgatgtccaggcagcgcaggccgcgcggcgaaggcaggcctcgaccggagaactcgtcgaaggcgccgatcagcttgtacgcgccgcgagacacgtagtcgtcgcccttgtcgacggtgatcgaggacgcggtggccacgttcgcggccggtttggtgacggcgacaccgtcgaccagcacatggccgtcacggatcagccgctgtgccttggagcggctcggcaccaatcccagaccgacgatgagcgcgtcaagacgttccattcctacacctttcacatccggtggtttccctgccagcggccttgtctttcagtggttctcgtcgagctcgcgctgcagctggccgagcacgtcgcggaatacctcgatgcgctggtcgtcgtctttgccgtcaaggtcggcgagctgtgggtaacgttcggtgatatcgtccggcatggccgctccttatgcctagtgtttcatgtgcccctgcacgtcacggaaaacgccgccggccttgcggcgggcggcgatgatcacagtgagaattccggcaatgagaccgaaccgatgtccccgccgttgtcggcgtacgtccatgcagcggcgcaggccgcgcgcagggcgttgatgtcggtcgcgtcgctcaccgtcagtgagccgtcttccagccgggcggtcgcgtcggcgcacgtccagacgttgccgtcgctcgcatcggtggatggctgggcctcctgcagtccgcgcaggtcgcggacgatataggacgggcgcagatgcgccggcgccgtcatcagctcatgcgggttggtgacgccggtcagcaccgcgagggaatcgtatccgccgcggttgccggcctcgatgtccgtatcgagacggtcgcctatcgccaggcacgattcacgactgaccggctccgtctcgtttcccgcggccagcagtcgggcctcgtcgtacatggcagactcgggcttgcccgcggatgcgatcggctcgacgccggtcgcgttgatgaccgcctggatcatggaaccgcatcccggcgcgatgccgagctcgcggggaatggtcaagtcgcggttggtgacgagatacagcgcaccccgctccaccgcgtacgagacctccgccatctgctgccacgtcatgtccggataccatccctggatgaccgcctccggggtgtcctcggcatggtctaccacggtgagtccttgaccggccacttcctcgcgcagatgctcggcacccagcacgaggatgcgcgctccggccggaacgtgccgggccaccatgcgggcggccaccacggacgaggtgatgacctgccgcggttcgacgtcaaggccgaagcctcgaagctgctcggcgacgacgcgctggaaacgggaggagttgttggtggtgtattccacctgcattcccgcacgctgcgccgccctgatggaatcggcggcgtgttccaccgggttcttgccccggtagacgacgccgtccagatcgagcagcgccagccggtacgtctgagatatgggacggtcggtggatttgagcatggcgttcatgcgcgtcactcgtcctgcgcttccgcagccggttcggcggcatccaaagcttccgcttcgtccgtctgcgcatcgtcggcttcggcggggtcggtgaaggattcggcgccttcttcggtctccttggccgtcagctcctcctcgtcggccagcgggccgtcaagggacgcctcgtcttcggcatcggggttctggccggcttcggcatcggctgagtcatcggagtcatccgattcggcatcgtccgactcgtcgccgtatccgtcttcggagccgccgtacatgtcgtcgtagtcgtcgggcgcgaactgggcgtcgtcctcgctgatgccgagcatgtcgagctcgtcatcggtgaagtgctccatgtcgtgatcgataatcacgtcgtccacggtctcgtcctcatcggcttcggcgtactgggtttcgagacggtcgagcaggtcgtccaatgcggcggcctcctcggtacggccgcactcgtcgaggaagtactgctcggcctgcacggcacgcatgcggtattcgcccggcagccctttggaacgtccgagcgtgtggacgatctcgatggccttgtcccacatcttgaggtcggcgagggcaccggcatagaccaggaacatctcggccttcgcctcgccatgcaacgccttggcatcgtcggagcgcaccacttcgatggccttcttgggatcgccgttgccgcgttcgcagtcggcgatgaacggcaggtagtcgaggaagccgttcatgcggtacgcggtgcggaactcacgcagggcgagcttgtaatcgccctgacggtacgcgatgaaggcaagcgtctcacgggagaaatcgatgcgcgacgcctgatgagcagcccacttggcgtgggcgagggccagttcgggatccttctcctccagcgcataggcggcgaggatgtgcaggccgatgttctcggcgtgctccttggacaggccgcgcaggcgttcacgctcttccttggacagcatggaccattccatgcccttgggcatcttcggctcgttcggacgacgatccgtataggggttctgcgaagggtagcttaccgtgccgtcggaattgcgacggggaccgttcatatagtcctgacgcttctgctcccgatattcgcgcttctcctcggcggagaactcgcgacgctcgccgtcgcggcggtcatcgcgctgatagcgcggacgatcgccatcacgatggaagtcgcggcggtcatcgcgacggtaacgcgggttgtcgccgccgcggcggtcatcgcgacggaaaccaccacgatcaccatccttgcggaaaccacccttgtggaagtcacggcgctccccatccttgcggaaaccaccatcccggcggaacccgccctgatcaccgtcacgacgcggaccacgatggaaatcacgacggtcaccatcacgacggtcgtcacgacggaaaccaccacgatcaccatcacgacggaacggacggtcaccatcacgacggtcatcgcgacggaaaccaccacgatcaccatccttgcggaaaccacccttgtggaagtcacggcgctccccatccttgcggaaaccaccatcccggcggaacccgccctgatcaccgtcacgacgtggaccacgatggaaatcacgacggtcaccatcacgacggtcgtcacgacggaaaccaccacgatcaccatcacgacggaacggacggtcaccatcacgacggtcatcgcgacggaaaccaccacgatcaccatccttgcggaaaccacccttgtggaagtcacggcgctccccatccttgcggaaaccgcccttgccgcggtatccgccatgctcgccgtcgcgacggaatccgccgcggtcgccgtccttgcggtaaccgcccgacttgcggtaaccgccggaacgtccggagccgtaaccgcggttgccgtatgatttgccgccggagcgaccctgttcttctgccatacgtgtatgcctttcttaatgcaaagtctgttgttgcgatgcgatgtcacgatgagcgggatggtctccgtgccggcgcaaccaccccagccggccctggccggcagctccccgccaaggggagcaggaacgaatcagtgcttctcgacgacgccgagcgccttcttgccgcggcggatgagcgcgaaacgaccgtgcaggaaatcgtcctgacccaacgtctgctcttcgtcggtcacacggttgttgttcagatacacgccaccggacttgatggtcttgcgggcctcggaaatagacttgaacaggcctgccttcaccccggcctcggtgatgcggtcgtcgatgccgacggacgcgaacgtcttggcaccggactcgtcctctatcttgagtccgtcgatggcggcttcaagcgtgtcctcgtcgatggaggcaaggtcgccgccgcgcccgaacagggctgcggacgcgtcgatcgccgcctgcgtcgcggcctcgccatgcacgaagctggtcacttcccatgcgagggtgcgctgggcttcgcgtgcgccgggattggtgcgcgattcttcggcgagtcgttcgatctcggcctttggcaggaacgtgaacgccttgagcaggccttccatctcgacgtcggggcggttgaaccagaactggtagaaccggtacgggctgagcatggtggcatcgagccacaccgcgttgccttcggatttgccgaatttctttccggtggcgtcggtgatgatcgggctggtgaacacgttcaccgtgacgccgcgcaccttgcgaatcaggtccataccggaggtcaggttgccccactggtcggatccgccgatttccagcgtgcagccgtactcgtcgaacaggtgaaggaagtcgttgccctgcagcacctggtagctgaattccgtgaaggagatgccctcctcggagttcagacgacgcgcgaccgtgtccttggccagcatggtgccgagtcggaagttcttgccgacgtcgcgcaggaagtcgatgacggacatctgcgcggtccagtcgtaattggagacgaaacgcaccggattgtcgccgtaggtttccagaatgccgccgatctgccgcttgagccgttcggcccagccggcgacgacgtccttcgggttgagggtgcgctcgcccgactggcgggggtcgccaatcagaccggtcgcgccgccgaccaaggcgatcggatgatgcccggcggcctgaaggtgacgcatgttgatcagctgcacgagattgccgatatgcagcgacgccgcggtcgggtcgaagccgcaataataggtgaccggctccccgttcaacgcttcggcgagttgtttcctgtcggtggactgggaaatcaacccgcgccattccagttcttcaaggacggaatcgaatccggcctctttgaaatcggtgacgtgagccatggatattggtactccctatcaaattctgggcattgtgcatctatcagtctcgcagaacatatcgacagcatgcgccaggacggctgcccgcgaaacgtcggggaatgctccccggttcgtcgcttgaatccggccgtcagtgacggtacaggctttcgagaatccggcgcagctgctccagcacatcgttgttgcgttcggtgcgcagtttcgggaacgaggcgatcattcgacgctgctgacggttgaagatggacatcgccgcgtccctgacccgcatcatgaagtcgaacgacatctctttgccggatttccacgattcgctcatcttgccggtgacatcgctgacggcgaccttcatggcgtctccgtaatgcgtcatggcggccatgagattgtcgagactgttctcgaaatgcatgatgccgcacaccgtgacgacgaggtcgatcagcgtgagcacgaacagcaccccgcacagccagtggatggcgggcagcggcagccggtcggtgacacctgcaacctgcggctggatcaccgacgtgatgagcacgccgcccacgccgaacacgaacgcccccagcaggcagatgcgcccgttaagattgaatttgtagtcggagtagtcccaccagcgggcatgaaacagcgcctccatgacccaggatgtgacgtattccagtatgctggcaccgaccatcgaaagcaggaacaccaccaggggattgtgcacctgtcccagcaccacgacggcgccgaccgcgcccgcaccgtaaatcgggcacaacgggccgttgaggaatccgcggttgactggccggcgctccaggatggacacgagaatggactcgtacacccatccgcaggagctgtagagcaggaaccacaggaacagtttttccacgaacagcatcaggccagcacctcccggctccgtgagggcttgtgccgcccgtcgtgcgcggacgctgcggatgctccgctttcgattgcggcgaggggtttaccggactccagttgcggcttggagaaccgctccagggagaaggtctcccgcgtggcactgatcttgtcggccatggtgaccagatagccttcgatgtatctcggcggcttgagcgtcatggggaacatgtggcatgcgatgctgtcacgttcgatcgcgttgaggcggaagtcacgcactgcgttgcgcaatgcagcctgcccgtgcgtgaacccgtgcagcctatgggcgccgtcatcccagtcatgccagtcatacaggaagtaatcgtgcagcagagccgcgcggaccagcgaatgcagatcgaccttgtcccacagatgcaggcggtcggccatccacacggcgaggcacgccacgcggatagaatgcgcgaatgtcgtcaccgctccatgctggtagcatccgcgctcgatatgctgcatatgatcatggacgatgatgtcgtgcccatgctcgttgaccaacgaccgaatctgattgcgcgtcagcacactgtttcccttcgcccgaatccgtcttccgtatgtctgtgtctcttccagtcatgattctaggtcaggctcctgtcacgcgggttcatccttcaggatgagcccgcgcgcgctggcggggatgtggaggcggtcagtcggtgacggaacgcagggacttcggggacttgtaggccggaccatcgctcacggagttggcgaacacgcgcagcgcgtcgacggtggccttggcgcaggcgatctgctcacgtacacgggccggcgacgtgccgcccttgccgttgcgggcggacacggagccttcggtggacagcacctcgcgcacctgcggggccttgtcggcgggcaggaagtcacggaagatcccgataaaatcgtcatccgtgagatcccacagctcctggccgcggccttcggcgagcttgacgcatgcaccggaaagctcatgcgcgtgacggaacggcacaccattcttgacgagccattcggcgatgtccgtggcgagcgcgaatccggtcggcgcttcggctgcaagacggtcgtggtcgaagctcatggtggcgatcataccggtgaaggcgggcagcagcacctccagcgtatcaacctggtcgaagaccgcctccttgtcttcctgcaggtcgcgggcgtacgcggtgggcaggcccttgagcgtggcgagcaggcctgtcaggtcgccgatgagacggccggacttgccgcgggcgagctcggcgatgtcggggttcttcttctgcggcatgatcgaggagccggtggagtaggcgtcatcgagacgcacgaacgcgaattcctgggtgttccagatgatgatctcctcgctcagacgcgagatgtcaacgccggccatggcggcgacgaacgcgaattcggccactaggtcgcgcgaggcggtgccgtcgatggagttctcggtgaccttgccgaaaccgagttctcgggcgaccgcgaccggctccagtccgagcgtgttgccggcgagcgccccggagccgtacgggctggcgtcgatgcgcttgtcccaatccacgagtcgctgcacgtcacgcagcagcggccacacgtgtgccatgagctgatgcgcgagcagcacgggctgggcgtgctgcatgtgggtgcggcccggcatgacggtgccgccggccttgaccgactggtcgatcagcgcggatgcgagggaaagcagctgacctgcgatgacgcgggagtggcggcgcagccacatgcggatcaggcaggcgatctgatcgttgcgggaacggccggcgcgcagtttgccgccgagctcgtcgcctgcgatctccagcaggccgcgctccagcgcggtggcctcgtcctcgtcgtcttcgatgggcgcaaacgcaccggagtcgacgcggcgctgcagctcgtcaagcgaggcttccatgcggctgagctcatcggcggtcagcaggcctgcgcggccgagggcgcgcgcgtgggcgcgggaaccggcgatgtcgtcatcggcgagtcgccagtcgaactgcgtggatttcgacagacgggccagctcgggcgacggtccggaagtgaagcggccgccccacagggcgaggtattcggtgttttcagccatgcgatactccttggagaatgggcatattcgtgcggtttcgactgtctgccagactatcagcgttgtgatacattctcgtggcggctctccggtcgagcggccagacatacacaagcaccagcaggaatggcaccgtacagcgttacaaaaccgtcagagggcgaatcgccagtgcgagacctcctcgtcgatgtcgaacccgccttcgagcacgaactgtttcaacagtttcgacgcctgtactttcactttgaaattcggcagcgtcacattcatgcatcgctcgaagaacgatttcgcccgtggcacgtcgatggtgtcacgcagggcgtcgaatcggccgaatgcgttcagacttttctcattgatatatctgacggtaagttcttcaagcaacgacctgtcaacgccgagatgatccacgagcttgtcgatctgctcatctttctctcgtttggcatagcgcgtgatgtagtcccgcagcgtcatgccttcctcgacttccacatcgccacgctccacatcatgcaggaacagctcagcaagtcgttgttcgtccctcgaaagcgcagcgaaggatcggtgcagctgtgcggacatctccgccaactccggactgtcctccttgagtgccttgagccatttgacgaagttggcattcatgtagtcggtgtcgatcagtccggtgtcgatttcggtgagatacccttccagctcataaggcgcttcggggtcacatctcccgtcatcgtccggttctgcggcgcagctgtcatcatcgaacagctccttataccgctgggcgagaatcagatatgtgcgttcgtcaatttggggacgcacaatatcaggttcgacgttcccgccatcgttctcatccgcatcgtcggcatccgtgccatcgaccttgtattccgtggtgttccagtcgaaaccctgcactttcgccgcttcaaggtaacgattcagctctacgaactccttggcgaacttgcgtctggcctccaccgattccggcagctgcatgaggtccgattccccgttatccgtgaacacgtcgagaatctccaagtaccgtgtatccatggatttcacgttcgcgggcagtttctgcacgaacaaatcaagcggcctgtcgccggagtacagtttcaccgccgcttcgatgaagccgtacatggtgtgcggcttgcggtagtagcggatgactccgaacggcttgtccggcccgaacaggcggttcgtgcggctgaacgcctggatgatgctttcatagtcgatgatcttgtcgagatacagcgtattcacccattttgagtcaaatccggtgagcatctggtccacgacgatgagcaaatcaagctgctggctgcggttcgtcgatatgctgccatatgggcttttgtgcgacaaacgcgatgagatgtccttcttcatcgccggccatgtggggatgatgaactctttgccgaacgcctcgttgtaatcggtgatgatttcagtcagcgcatcttctttgtccgttgctccttcgttgttgtcgatgttgggatcgaacaacgccgttacatgcaacttaggtgcttgctgcttgaacaagtgataatagttgacagcttcaggaatggagctagtggcgagcatcgcatggaatttgcccgcatggctgagcaccgggaactgttcgagaatgtccgagaccaccatgttcggatgcggggagtcgatgccatattggtctcgtccaaggaaatcctcgatgccactgatacggtttccagcgccatcaaccatcggccccatagggacctcggatttatccatgtaatgctgaaacaccttagctttaatggggtcagcaagtgcatcttccgtactctcagctttcgccttgtcgagagccacggcacgtctgacttcagaatccttgtacgtggtcaccatgtacggatcgaatccgagcacattatggtcacggatgccgtcggcgatgctgtaccggtgcaggcaacgaccgaacaccatggcggtggtggagttcttcttctggttttcgcccagaatgggtgtgcctgtgaatccgaagaacagcgcgttggggaaggaacggcggatgacttgcaacatgtcgccgaaggtggagcgatggcattcgtccacgatgaagacgatgcgtcgtgcagcaagttgatccagccatgtctgggtgacgccccgctcccctgctttcacgttgctcatcttctggattgaggtgacaatcagagtgtcattgacatcggtgctgttgagtttatcccgcaaaacaccggtgttctcggtgccttgcacttccgtctcgctgtcggcgaagctgcggtattccttcaacgattgggtgcccagttcgattcggtccatgaggaacacgaccttgtcggcgtcatgcgaatcggcaatgagctgagccgatttgaagctggtcatggtcttgcctgaaccggtggtgtgccacacatagccgccgggtcgtcctggggtagctggccgctgttcccaatcacatttcctcaccacatcggagatggcgtttgccgcgaggtactggtagctgcgcagcaccttaagacatccatccgccgagtcggcgatggtgtagaaaccgatgagctggtgcgccatgggaatggacagcaggccggcggtgccggaggtgcctccgatgaacagcttccattcgtctttgcctgggtgttgcccgccacagataggctcgttgttgtagtccgcccaatggaagtaatagcttggattgaatttgtccgcgccgggattggcgaagtagacggcgtcgtcgggggtcatggccacgaagatctgcacgagacggaacaggccggtgaacacgccttcgtgcgcgtatttttcgatctgattggtcgcttggctgacgggtatgccgcttctcttgagctcgatatggatcaatggcatgccattgatgaggagcacgaggtcgccgcgccgcgagttcagcatcgtgttcttggctggatagaccggttgctgaacgatttggtaggtgcttttgccgcccgcgatctccttgcggtcatagatgtagagactgacttccttgccgaaatgcgccacatcttctttgttgtcacgcgtgatagacacggtacgcccgttgacgaacgaattgagcgcgagcggcgttcgcagggtctcgatctgctcgattatctgtgccatttccccgtccgtcagcgggtatttgccaagcctgtctatgtcgttgttgttgcggtacagtatgtctttccaattgtcgagcaaatcccgctcagttggatagcgcaggacaccgtccttccatccatgctgcttaagcacggtgatgacgttttcctcaaacaccgattcgctatcgaatatcatgattcttctcccctttggacttcccagtgtcctgcctttcgcgagccgacgcgcttaagcaatccacacccaatgagtatttcagcatctctccgcacagtcgctgatgagactcccacggcacgcgccatatcatcgtatgtcgcgctggggctcttctctacaaaatgaagaatgactcgctgtctctcggttatctgctcattcaaaccatttaactgctcattattgtcagttatctgctcattcgaactatttatctgctcataatcgtcagatatctgctcattgttatcaggcttggcatccgcctccaacatgagcgtgagtatcgtgcgatcagcttctccgaagttctcttcaatctgtggttcaggaagtcctgcattcgcccatgtggcgaacacatcggggacacccgtaccagctcgctcgcccacatcgattaggctgaacatcttcatgacaagaccgttgcgcggatcagacaccccgccgaggcgcatctgttcaatgccggttcggatatcacccggattctcgaacaccaacttgtcgggggtgcgcctgaccaccactccgcgtacgccatggtaatcggcgttgaacaagcagttggccaacgcctcacggaccgccttatgcatgggggtgtcatcgacgcggaaaatgccgtcgagcttgaacggggtcttcagggattcggcaagcttgcggttcacgcggaagaagaaatcgaacaggttgcccgaccacatgccatcgccggaatggacacgatcagtccaacgaatcgtcggatctagagtctcctgataatcaaggaaataatgcggacattcgcgcacgatgtcatagtcgttgccgaacataagcagaccgccgaacgtgggatgcagcttaccgtcttctcggctcaccattgccgcgccaacagcacgcagaaaacgctcgtcatcgagatcggtccaggagctgccctgtcgcgctgcgcggaaacgattgcgatatgcccgcactgtgtctgtattgaagtcggcaacagtgagatcgtccagcaccttggaatccatcgtctcagctccctgatcccggagcattgctgagatctcctgccgcgtgcaacggtagtcgccctcaccacgccgacggtaggttcccccgaagagatcattattgatatacacggggcgttcgtcacgcggagcgcgcggaacgtgaatagccagcactatcccaccatccgcttcgagcacttcaacttccgattcgatgggcagcacggcgctcaccttggaccggttgctgaccgtgttccaaaagtcctggcgaagatgttccgcttcagttggtgtaagtccaatcggcgcgaaggtaccgtcttcgcgctccttgacgccaagcaggatgacgccgccgtaggtgttggcaaaggcggagtatgtctcccacatgctgcgtgggaggccgccctttgcggctttcgcctcgatccggttattctcgcgatatgaggcgagcttcacgatatcgaaggtctccattgctccgcctcccctcacacaaacatcttgtcaagcaaggatttcttaatattctgcagcaattccaacttacgctgatgaagggtgatgaggtcgtcaaggtgattgaagaactggccaattactttttgctcagacttgcatggcatgagaatacttgcattgctgacaagctctttgttgagattgttgacggtacttccagaagcgagcatacgatactgattgagcattttcggggtaccaagcatgtggcaaagatacattggatcaaagcttttcggctcatcccgaatcaacaaccaaccatcatgaatacagccttctatcgccattatgtatggtctgccaaagctcattgaattggacagaatcaaatcgccagggtgcacttgccgggtcttgctcaggccctcaggttttattttctcggaggtcttactgatataccgaccaagcgaaggagcatcgccaatcttgacccaattcaaaccattggtgtcatccgttatgtattcatcgatcggacgtggtgaaccacctcgttcaataacgacaagttcacccaacttacgctgttcccaagggtcagtaaaaccagcgaaacgaatctcgggtacagactcgccatctttcgggaacattttttcaagcatcgattttttgaacacgacgagcttgtcatacttacgctgatgaagggtgatgagggtatccgttgtttcaagctgcttcgctatcgccatctgttcagagatttctgggcaccaaataggcatctcgaaaaacgttgcgtcggagattgaaaacctgtcagaccttgcccccgtattaccttcgaggaacataaaatcatgccacctggatgttttgaaataatgctccaagtaggttttatccatgctcgcatctactgaaaacaccgtatacaacggagacatgacacctgctctgttcaggcggtttctgttgattggaccacaaggcgccgttgcagaaatccgtgggttgtagacgaagtcatctggttgaaccacatagtagccactgatattcgcatcgtttgtaatgtcgtggtcgaagtagtcgagctggctaataacgccctgctcggcagaatttgtaaacgtctccgaaagagcgccgttagcgttcttgactgtgttcttcttgctgaattcccccaacttacgctgttcccaagggtcagtaaaaccagcgaaacgaatcgcaggaactttcgcctgttcagtcatcattcacctcccaacagggtcttcagctcggcaataccggccatatcgaactcattgccggttagttgaccaagcatattgccaagttctgcctcagcctgttcgatctgttcgcacacatcagagtatgtggtcgaatacttgtcgttcagcgcattcaccgctgcaatcaactcatcaacagccgtctgagggagctcctcaagcttgcgctgcaatggttccacccacttggcagcaagcaagtcatcagcatgttcatcgctcagtccttcaataacggtccgggtcttttcatcaagcgctgaacggagattcttaacgttctttttgacttcacgctcttcatcaaacaaccgctgtgcactcacaagagcacggtcaaagtcagtctcgggattcttcccaatcgatttcactgctttcttcaattcagcggcaacgaaagaatctccatcctcgctgacggcatcagtcgaactcttgtcatcctcatccagattttcaagaatgtcagcgatttcgccgccaatctcactcagccgagattcaaatgtggcaatttccgcaagatcagagttaagtaatttcccctgtacgagatcgaacggcagaatatgcccgacccagccgtccggcacttcgacatccttaccgcctttcttcttgacgaccatatcggcatcgactttgcgaacggcgtcatgtccctcggcctgtatggtttcaaggtcgatggagatagtcttttgccaactatcgtcaagcacctgatacgctgcataggcgtctacgagagggacaccagccaaacgacgcagcagatcatttgccagagtctcctcttcggcggcaacgcccacattggcggcattacccaccaattcaccgcgtatatgagccggataatcgatgaacgcctcatgataacgctggatatatgccttcacatctgagtcggcattcaccgcctcacgaacgtcttgcacggcgagcttggccgaatggccgttctcctccgcgaaaaggcaccggcgcagtccggggaacacgttccaatatttgctgagtgcatcgatgtcccgcttaggaatgccgccgaacatagtggaatacacatcccagctctcggcattgtcggaggaatccacgtagcgaggaatattgaggttatagtcgttctgccgaatctcatcgatacccaccaagcggctgaacttatcgacgtcacgattccctgtcaccgcatccacgatgcgtttgatatcgctcgcacgcagcttgttgttcttgccttccttggtgaagtatttggaagcgtccacgatgagcacatgatcgtcgtcgcgatgtttgcgcagcaccatcacgatggtggggatgccggtgccgaagaagatgttcgcgggcaagccgatgatggcctgaatgtggtggttctccaccaggttccggcgaatagtgccttcctcaccaccacggaacagcacgccatggggcaatacgatggtcatgatgccgtcgtcgcgcagatggtagaggtcatgcagcaggaaggcgtagtccgccttggacttgggcgcgatgccgtattcgaagcggatatcctcgccggcctccggcggttcccaattctgggagtagggaggattcgagaccacagcgtccacgaacagcggctcataggtctcatccttggtctcgtcggtgtcgaaccacggccagtcgcttttcagtgtgtctccgttgcgggccacgatgttgtccggcaggatgccgcgcatgacaaggttcatgcgcgtgaggttgtaggtgttctccttgagttcctgcgcgtaatacctgatgtcattcgggttgccgttgcgacgggccaccgcctggccgatgtggatgagcaacgaacccgaaccgcttgtggggtcatagatgttgatttcctcacggccggcgagatgccaggccacgatttcgctcatgagctgtgagacctcgctcggcgtgtagaactcgccggccttcttacccgcgttggaggcgaaattgctgatcaggtattcatagatgaagccgagggtgtcgtagtcctgccggctgtccatcggaatgtccttgatgaggtagatgaggtcacgtgcggccttgctgcggcttttctcatcggtgccgagtttggacaggccggtctgcaaggtgtcgaagatgcccgcgaacacgcgcttgcgggcagggtcgatgttgcggtcgaacgcggaaagcgcgtcgcgcacattggcgatggcgaaatcccccttcttcgccacccatgtggagaacaggttatcgtaggagatgaagtagccgcacagatcgcgcacgtactgcgcggtctcggtatcatcctcccgcaattcttcgaggtcttcgtcccccatgccatcagcatgcagacgagtgacttcggtctcggaaaggaacttgtagaagatgaagccgaggatgtaatccttgtattcgttggcttcgatcttcgagcgcattttgttggccgactcccagatcttggcggcaagctgctgcttattcattcatatgctccttgcttctgtacacataatcaagggtctgcccctgctcattgacccattcggtccacccgttttggctgccgccgagaacgaatacagcggcggaggagggactggacagctcgacatcgtccgcaagaatcactttgcctgtctgcgcggcgaaaagctgccgtcgagctgccacggctccttgatttttgatcaccgcatgaccaaggtccacctcggagcccgaaagaaccgtgaaacggccggtatcccggttgtatcgtccagtcgcacgcacgccgttcttcttggtgtggaacacggtattcactgcaaccggcgttgtctccttgcggtcgagatcatatccgagcacgcgcatgcggaaaagaatgctgccgtgcaggtcctccacccgctgctctttgtatgggttcatgcgaggagcgggagtattcccgttatcggtctcatatgagccgtgttcacgcacgtaatcgatggccttcgcctcaagcgagtccagaacatcacggtcgatattgacatcgttatcgaggaacatgatggctttgttccagaactcctttttggtcttgtgcgcatcaagtctgacaagtcccctcgtggtttgccccgcgtacacacgactcagcacaccatgatcctcatcaagcaggtaatacacaccgcggtctggcagatcgggaagacacttcgcctcgcccaacatgtctctgggcaccacgacagtgacaagcgattccccgtccacccggcaaatacggataccatccggattgttgtcaattatttgtatggtcatggcggtgagcgcaatcaattacttgccgcccttcgccaactcattgatcatgcatgtccttacgaacgccgagaagctcattcctctcagagacgcggcttctttggcggaatcccgcaggttagcgggaatgcgcatggtaactggcaccacgtcaccgtctactagatatgagcgtatctctgtttcaccagcctcatgttcaatcaaatcggagtacgtcatcgcatcccacgctttcaaaccgcagtataaatgcattaattatacacccgcttgggaacagcgtaagttgggcgaagtagcaacgtttggcggcgggcatactccgccaatggcagatcccgataactatgaagatggatacgtactgtgggttacgtcccaggacgtgaaatctaattatcttgatagaactacgactcagataactgagaagggcgcaaaagagttgactctttatcctgccggatctttagtaatggtaacgaggagcgggattcttcgccatacccttccggtggctgaactgcgcaaaccttcaactgttaaccaggatattcgcgtcattctgccccaaggcgagtgctgtggagaatggctacttcagttctttatttcgcataacaaggaattgctgcttgagtttggcaagactggaacaaccgtagaaagtgttgactttggcaagatcaaagacatgcttttgtatatgccaagcaccgtcgaacaacagcaaattggcgacttctttgctaagctcgactccctcatcacccttcatcagcgtaagcgcgaaagccgcatcatccgcgtgcgctcattcatatggttagctggtgatatatccggcatcggcgtaagcgcatatcaaccagaaaagagaagaccgtatgaccgaaggcaacaccaacgccgaaacgttgttttgcgattactacgagcaatggatcagcgtatacaaggaaggtgcaattcgtgaagtgaccatgaagaaataccggctcacgcaggcatggttgggccggctcattcccgatctcaaactcgccgacatggatcgcgtgaactatcagaagctcatcaacggctacgccgaacatcacgaacgccagacgacgatggatttccatcatcaattgaaaggagccattcttgacgcggtcgacgaagggctgattcagcgcgacccgactcgtaaggcaatcatcaagggcaagccgccatgctcaaagaaaacgaagtatctcaatcagttcgagcttcatgcggtccttgcggatctcgaactcggcaagggaccaagctgggattggctgatactgttggtggcgaaaaccgggttacggttctcggaagctttgggactcacacccgacgactttgatttcgtgcatcagaccctttcggtcagtaaaacgtgggattacaagaacggcggaggattcgtccccaccaagaacgcatcctccgtacgaaaggtgcagctcgattggcagcttatcatgcagctctcaacgctcctgaaagatatgcctgcgagcgaccccattttcgtgaatggcaaggtgtataactccaccgcgaataatatcctcgccaggcattgcgaacgggccaacgttcccgtgatttcgattcatgggttaaggcacacccatgcctcgctgttgttgtttgccggcgtatcgattgccagtgtgtccaagcgacttggtcatgcaagcatgaacaccacacaggacacttatcttcatgtcatccgcgaacttgaaaacaaggatgtcgatatcgtgatgcgtgccctctccaccctcatctaaccatttcaaccactgccgcttacgctgatgaagggtgatgaggtcgtcaaggcgggagaagagtacgccaattagctcctgctcctcgatggaaggcacaaatgcaaactcatcttccagcgcagctttatcaagattaccaatagagccgttgccaccagccactccagtcgccaagaagtgctggtaccatcgcgaccccataagtgcggcgacgtagtcgggctgttctgcatgagcgcaaagcatgaagccgccatggactgtcttcccagttaaaccattgataatggcacgtttgccaacaagtctaggagagccattcgcagcagtgatgagtatttcaccttcttgcaccagctctattccaactacagtctcgtccacgaatacatcttcattactgagggtaaactcgtcctcatcgatattagatgatctaagcacgcgaataccttgaccgtatggccgaatatctgcgggcgagtacgtcaaccctctccgcaaagaagctagctctgagaacttacgctgttcccaagcgggtgtacccctgtcatgtcagttgtcctcaagtaaggcaaaaggctcccctgcgcatatgcgcaaaagagccttgcaaatcagcgggagccgttcgacgatattactcgacggtgttcttcggcacctcgatgccgttgccgaacttgacgtcgcgggcggcggccacgcgggacggcaggccgtagatgtcgatgaagccgttggaggacttctggtcgaagctgtcgccggagtcgtaggtggcgaggttgtagtcgtacagcgagctgtcggagcgacggccggtgacgacggcgcgaccgccgtgcagcaccatgcgaatctcgccggagacgtacttctgggtgtcctcgatgaaggcgttgagcgactgggtggcggggctgaaccactgcgcatcgtacaccagctcaccccagcgcttgtcgatgtcacgcttgatgcggtgctgttcgcgctccaggcagcagttctccagctcctggtgtgcggtaatcagagcaacggcgcccggggcctcgtacagctcgcgggacttgatgccgaccagacgatcctcgatcaggtcgatacggccgatgccctgggcgccggcgcggcggttcatctcctcgatggcctgcagcggggtgacgtcgcggccgtcgatcttgacgggaatgccttccttgaactcgatgaccacttcgtcctcgacgggcgggaacgccgggtcgtcggtgtaggagtagcagtccttggtcgggccgttccacggatcctcaaggaagccggtctcgatggcgcggccccacacgttctggtcgatggagtacggggacttctcggtctgggtaatcggcagcttgtgctccttggcgaacgcgatctcgacgtcacgggtcagcgacaggtcgcgaatcgggctgattgccctcagggtcgggtcgatggacgagatggaaacctcgaaacgcacctggtcgttacccttgccggtgcagccgtgagagatggtgtcggcgccgaactggtgggcggcgcgcacgaggtgcttggagatcagcggacgggagatggcggagaccagcgggtacacgccctcgtacatggcgttggccttcagggccttcatgcagtactcgttggcgaactcgtttcgggcgtcgaccacatacgcctcgacggcaccgcaggcgagcgcacggttcttgatggtctccaggctttcgccgccctggccgacatcgagggacaccgcgacgacgtccttgccggtacgatccttgaggtacgggatggccacggaggtgtcaaggccaccggaatatgcgagtacgattcggttgttgtctgccatgggatgcctttctacaaaaacgaactgctgcaagtatatacgaatgtctgtatatttatgcaatcggtgtggcgaatactgaaccgggccccttcccgagcgattcagttcttcgacgcgagcgtcagcagccactgcgagcgctcgaaggcgatgtcgtcttcggcgcatatcaccatcaccgtgtcatcgcccgcgatggtgccgagcacgccgtcgatgggttgcttgtcgatgacgctcgccacatactgggccgcgcccgaaggcgtgtggatgacgaccaggttcttggccgacgcgaccgatgtgaccaagccgctgagcacgcgggacatctgctgctcggccttggacccgatgccgctgccgaccgactccctgagcggacggtcgccgatcgtataggcgatgctgccgttggacagtcgcgtcttcatcgcgttgatctcgtccagatctcggctgagcgtcgcctgcgtcacctcgatgccctcctgggagagcagatccgacagttgcgactgggacgtgacgatgtgcttgagcagcacctgttcgatggcgctcaatcgcgcggcacgtgtggccggccgctgcacgggaggtgtcgattcactcatttatgccctttccggtggtttgccgaacgtctgcgcaccctgcaagccacccgcatactacggcatcgagcattaggccagcagcgattcgtcgccccgctgctgcccgatcaaccaggtcaacagcgccttctgcgcatgcagacggttctcggcctcatcccacaccacggactgcgggccgtcgatcaccgacgcggtgacctccttgccgcggtatgccggcaggcagtgctggaacagcgcgtcgggcttggccagagccatgagctcatcgttcacctgataatcccagaacggcttggagcggatggcgtactcggcttcctctcccatcgacacccacgtgtcggtgaagatgcagtcggcgtcggcgaccgcctcccgcggatcggtggtgaccaggatggagccgccgttctcggcggcgatccgctccgcgtcggcgacgatggcgggatcgggaagatacccgaacggaccggcgatgcggacgttcatgcctgcggtggcaccgctcagcagatacgagttggccatgttgttggccgaatcgccgagataggcgatggtcttgcccggcaaagcatccacaccgccacggtgctgcgcgatggtgagcaggtcggcgagcacctgacaggggtggaactggtcggtcagcgcgttgacgaccgggcaggtggcgtatttcgccatctcttcgacgcggtcctgaccgaacgtgcgccagacgatgctgtaggccatgctggtgagcactcgcgcagtgtcggcgaccggctcgccgcggcccagctgggaaccggacttgtcgatgaccagcggatacccgccgagttccgccacgccgatggagaagctggaacgggtgcgggtggagggcttgtcgaacagcacggcgacggcctgggggccggcgaacggctgacggtagaagcggttctcgcggaatttcatgccgagttccagaatctgcttctgttcggcatggttgatgtcgtcgtcacgcagcatatggcgaagttgaccggccatgaggtgctccttctgtggttcgggatgggtgcggatgttgtatcggcttgggcgtgcggggcgggctggttgtcgcggcccgtcccgtaatcgtcgtggaggtcagtcgttgggcaggtcggcggggatcttcgcgaggatggacacggcttcgtcgatttcctgctcggagacgatcagcggcggtgccaggcgcagtgcgtcgggtgcgaccgcgttgacgatcaggccatgttccagagcccagttcatcgccgcatgcgagcagcggtgggacaggaggatggcgttgagcagaccgcggccgcgcacggaggtgaacagcgggttgccggatgccatgatgccctggcgcagttgctcgccgcgctcttcggcgttctcgaccagatgctcgttctcgatggtgtccagcgtggcgagggccgccgccgcgcccaagggattgcccgcgaaggtggagccgtgggatcccggcgtgaacagcgcggacagcttgcctccgaatgagatcatgccgcccatggggaatcctccggcgacgcccttggcgaacgtcacgatgtcgggagtgatgccgcccgtcaggtcctcgcgctggaacgcgaaccacgagcctgtgcgaccgatgccggtctggacctcgtcgatgatgagcagggcgtggttgatgtcgcacaactcccgcaccttcttcacatatgcgacgtccagcggacgcacgccggcctcgccctgaatgagttcgaggatgaccgcggccacaggacccttgccatactggccgagtccggtggcagagaacgcctcatacatcgcgatggggtcgcctgcacgcacgaattcgatgttcggcaccagcggctcgaacggcttgcggatcacgggcttccacgtggcggacagagcgcccatggtacggccgtggaatccgtgggtgagcgccaggatgcgcgccggcttgccgccgatgctcgggctcgcgcccggcagcgtgcgaccgtacagcttggcgagcttcagcgcagcctcattgccttcggcaccggagttgccgaagtagacgtgggagccttccggggccccggcgagcgcaatcagtcgcgacgcgagcctgatctgcggctcggtcgcgaaatagttgctcacgtgggcgcatttcgcggcctgctcggacaccgccttcacccatgcggggtgcgcgtagcccagcgaattgacggcgatgcccgcgaggaagtcaaggtattcgttgccgtccacgtcccatacgcgcacgccttcgccgtggtccatcacgcgcagcggcgtgccgaacacgttcatgtggacctggctgtactgtcccagccattgcgagtcggtggggccgagcgtttccttagtaggcataggaactcctcatttcgatgccatcatcgggcacaaccatggtgccgatgccggcggtggtgaaaatctcattcaggatggaatgcggcttgcggccgtcgatgatgtgcgcctgcggcacgccgccatcgagggcgcggacgcaggcctccatcttcgggcgcatcccggattcgaggtcgggaagcatgtcacgcaggttctccacaccgatgcggccgatcagcgagttcttgtcgggccaatcggcgtacaggccgtcgacgtcggtcaggatgatcagcttcctggcgccgagtgccgcggccagcgcggcggcggccgaatcagcgttgacgttcagcacttccgtggcgtcgtcctcatcgggggcgaccgaggagacgacggggatgcggccggccgagatcaggtcctccaccgcggaggcgtcgacgctcaccacgtcgcccaccagcccgatgtcggtaggcttgccgtcgatgatgggtttacgctgcatggcggagaacagggcgccgtcctcaccggacagtcccacggcgaacggaccatgcgcgttgatcagtccgaccagttccctggacaccttgccggtgagcaccatgcgcaccacgtccatggcctccggagtggtgacgcgcaagccgcccttgaactccgacttgatgcccaatgccttgagcatgtgcgagatctgcgggccgccgccatggacgacgaccggatgcaggcccacctgccgcagaaacaccatgtcttcggcgaagcaacgcttgagatgctcgtcgaccatggcgttgccgccgtatttcaccacgatgcgctgcccggcgaactcctccagccacggcagcgcatcgatcagcacctccgctttctggtcggcgcgcaggtcggtgtgcacgtcgaaatggaaccctggtcccttcagttcagtagccatattctcctctatcgcatcccgcttctccggccggcatgtgccggggaggaaccgggagactagctttcgtaatcggcattgatatgaacgtactcgtgggtgaggtcatcggtccacaccgtggcctgttcgtcaccggcgttgagatcgatgtcgatgtgcacctcgcggggggtcatgtcgacttcggagcggtcgcgtcccgcgcccccattctcgcagatcctcacgccgttgacgtccacggtgaccttctgcgaatcgtagggcgcctcttcgacgggcacggtgcccagcgaggatacgatgcgtccccagttcgggtcgttgcccgcaatggcgcatttgagcaggttcgaggccgcgaccgcgcgggcgcaggccagggcggcgctctccgtggtggcgccggtgacggtgatgcgcacgtcgtggctcgctccctcgccgtcgccgatgatctgccgggccagcgatgcgcatgccttggcgaccagggcgttgaactcgtccggatcgggctcaacgccggacgcgccggatgcgagcagcagcaccgtgtcgttcgtggacatgcacccgtccacgtcgatgcggttgaacgaatggtccaccgcggcgttcagcgcagcctgcagctgaccggcgccgacggcggcgtccgtggtgatgacgcacagcatcgtggcgagctggggggcgatcatgcccgatcccttgaccatgccgccgatgcggtatccgtcgccttccaacgatacggtcttcggcttcgtgtccgtcgtcatgatggcgtgggacgcgtcgcttcccgcctggtcgtcgtccgacagggccacgtacgcgctttccactcccgacagcacatgatccagcggcagcagctcgccgatcaggcctgtggagcatacggcgatctcgtcgggctgcgtcccgacgagctccgcgaccttcttggccgtcgccgccgattgctcgtatcccgcctggccggtgcatgcgttggctccaccggagttgaggatcaccgccttgatatggccgtcggcgaccgtcttgcgggaccactgcaccggtgccgcgcagaatcggttgaacgtgaacacgccggccgcgctgtcgagcggcccctgattgacgaccagggcgagatccttcttgccctcgatggaggagatgcccgccgcgacgcccgcggcgctgaatcctttggcgaatgtgacactcacggtgctactccaatcttcgtaagtcccttgtcttcgggaagtccaagtgcgacgttcagcgactgcacggcctggcccgcagtgccgcggttcaggttgtcgatggcggcgaaggcgatgagacgcccggagtgccggtcggtgaccacctgcacgtgggcggcgttcgatccgacgacgttcgccgtggccgggagcgtgcccggctccagcagcacgatgaactcctggccggcgtatgccttggcccacacgtcgtggatttcctcgtcgctcatggaaagcgccttgtcggtcatcttcgcgctgaccgtggcgaggatgccacgcgccatcggcgcgagtatcggcgtgaatccgagcgtgaactcctcggcccgggcggcgtccaaacctgccgcatgggcgaagttctgcaaaatctcggggatatggcgatgcgtgccgcccacgccgtagggcacggcggagccgaacgcctcggcggcgagcaggttcgtgcgcttgaggttcttgcccgcgcccgaataccccaccaccagatcggcgacgaggtcacgacgttccacgagtccttcggcgatggccggctgcatggcgagcgtcgtcgcagtcacgttgcagcccggcccggcaatgcgcttggcgccggggagcaggtcgcgctgacgcgtgtactctccgtctgcgctcttgccggtgatcagctcgggcatgccgtacgtccaatggtcgaagaactcgcctccgtagaacgcgtcccacgcggagcgctcctcaagacgatggtccgcacccaggtcgacgaccacggcaccggggtcaagctgcgcggccaacgccccggacgcgccgtggggcagcgccaggatgatcacgtcatggccgttcagcacttcggcggtggtgtcctccaccgtcagatccgccagctggggaatatgcggcatatgccgtccgagtttctgccccaccgaggaatggcccgccacgcaggtcacctcgaagtccgggtgggcggcaaggatgcgcaacgcctccccacccgcgtatccggtggcgccagccacagctaccgtatatctcgccatatcacgctcttttcatcgaagacgaactacggcgagtatacatgttatgcagtacattgcatatattcattcatcggcttgcgtgtcgcagcacacggcccatcacaccgaaacggagtcccccgacccgcttccgcccgtgccgggcgccagcatgttgagcatggcctggtacatgtcgtccatcgatatgccgtgcatcgtcatccatatgacgatgatggtggtcagcacgttgatgacgacggccgcgatggccagtccgcggccccgcgtatggaaacgacgggtgcgccagatggccaggcagccgatcagcgcgggcagcaccgggaacgaggacaccagggcgaaaatgaacgagaatatggcgtagaaatcccaatgcccgtaaatagggttctgctgcgggtcgttgaggtcgatgccgttgaaatatcggggaggctcccgtcggggaccgccttggtcgggcccaccctgagccggagccgcattgggggcggaaccgccctgagcgggagccggcccggctccgaacacggaggccggctgagacggcgacggctgcgcctgcggagccggctgctcgggctggcctccatatacgtaagggttgtaattcggcggaaactcatccgccctggcaccatattcaggctcgatgcgctgaccgtattgcggctgggccgcaacatgccgggactcgcccgaactatcgtcagacgattgcggctgttgttgcggctctgtcatatgcatgtcctccatggtgccttttcatcggcggtcaggcgcgcagctgagcgccgatggcctccgccttgtcgacgatggccttgcgaatggcctcactgtcctccgcggacagtgtcttggacggggagcggaaggtcaccgcgaaggcgagcgacttcttgccctctcccacctgctcgccggtgaacacgtcgaacagctcgatggattcgaggttggcgccggccgcctcgcggaccacggcctcaagctgggccgcggtcaccgactggtcaacggtgaaggcgaggtcctgcttgacgggcgggaacgtggcgatgggcttcgcctgcacgggcttgccgtcaagcgtgccgaacagcgcggtaaggttcagctcgaacgccgcggagtgcgccggcagtcccagcgcctcgttgacacgcgggtgcagctctccgaccatgccgacgacctgttcgcccgcgacgatctgcgcggcgcggccggggtgccactgcgcgggcacatcctgcgcggcgggctgccgcagctcgtaacgcgcacccaaacggtcgcagacacggcgaacggcctcgacggcgtcgctccaatcgacggcgcgacgatcgccgagccatccggagtcgaccgcgttgccggtcagcaggccggcgacgtgcagcggctgatcgggaaggcccgcatccagcgcggcaagctgctcatcgctggggcgtacgcctcccggaagagccgggatggcgggcgcgttcggatcccacaggtacacgtggccgatctcgtacaggcggatgtcttcgaggcctcggcgcaggttgcgctgcacggtggtggcgagcgtggggagcacatcacgacgcaggtacgggcggtcgccggccagcgggttggcgatctcgacgctcaccggcttgatgaccgccggatcataggagaacgccttgaagtcctcatcgccgacgaacgggtagctcagcgactcgaccatgccgtattcggcaagcgtgtctgcgacccagcgctggcgacgctggtcgggggtcagcccgaccgcgcccttgaccggagccggaggcacggtgacggggatctcgtcgtagccgaccagtcgggcgacttcttcgaccaggtcgcacggctcattcagatcggggcgccaggtcggagcggacacggagaactcgccgttgccgccgccagcgacacggcatccgacatcggtgaggatgtcgctgatgcggttgacgtccacgtcgagcccggcgacgcgggcgacctcggtggccttgaaggggatcggacggcgatacatcgtcgtgttcacgtcggtcgggtgcccggacggctcgccgttgccgaacttggtgagcagttcggccgccatctgcgcggccgcgggctgcagctgcgtgtcgacgccgcgctcgaaccggcgggacgcctcggaggggatcttgtggcgtcgtgcggaacgtgcgatggagacgctgtcgaaatgcgcggcctccagcaggatgttcttggtgtccgcagtgacctcaccgtacaggccgcccatgacgccggcgatgccgagaatgcgcgagccacgcttgccgtcgggcgaatcggtgatcagcaggtcctcgacgctcaggtcgtgttccttgccgtcgagcgtggtgagcttctcgccttcggccgcgcgacgcaccacgatcggcccttcgatcttgtcaaggtcgtaggcgtgcatcggctggccaaggtccagcatcacgtagttcgtcacatccacggcgagggagatcgaacgcatgcctgcgcggataagacggcggcgcatccagttcggcgtgtgattcgtcgggtcgaacccgtggatggcgcgggcgacgtagcggtcgcagccggtgacgccgtgaatcgggttgttgtcgtcgacgatgacctcgatgtcgctggagacgccggactccaccgcgggagcggcgggggcgcgcttgttgagctcggtcaccggatcgacgaacttcgcgccggtggaatgatggtattcgcgggccacgccgcggtacgagaacgcatagccgcgatccggggtgatgttgatttccaggatcggctggtcgaggtgcagcaggtgcatcgcgtcgtcgccgggcttgagcgccttgtattcctggggcgtgaagccgtagtcgcgcagcaggatgatgccttcgtggctgtcgcccaggccgagctcgcgctccgaggcgcacatgccgtcggaaacgtggccgtaggtcttgcgcggttcgatcttgaaatcgccgggcagcactgcacccggcaaggtcacgacgaccttctcgccggcggccatgttcggggcgccgcagatgatgccgcgcggcaccttcttgccgttctcgtcgaccgcgttgtacgcggggccgacgtcgacatgacaccagttgatggtcttgccgttcttctgcggttccggcgtcgcgtcgacgacatatccgacgacgatcggaccggtgacctgggaggcgtggatctcctcctcctcaagaccgaccctgaccaggtccttggccagctgctcgtaggtgaggtcagacggaacctcgacgtgctccttgagccaatcaatgtcaaccataggcatgggcttctcactcccccatcacaaactgttcgctgaatcgcacgtcgccctcaacgaggtcgtgcatgtcgttgatatcggaacgcagcagcagcgtgcgctccatgcccacaccgaacgcgaaaccggtgtactcctcggggtcgatgcccgcggacttcagcacgttcgggttcaccatgccgcagccaccccattcgagccagcccgcgccgcccttcttgtcggggaaccacaggtcgagttcggcgctcggctcggtgaacgggaagtagctcgggcgcagacgcgtcttcgcttcgggaccgaacatggccacggcgagcttgtcgagcacgcccttcaggtcggccatcgtcaggtgcttgtcgacggccagagcctcgcactggtggaacacgggggtgtgcgtcgcgtcgagctcgtcggtgcggaacacacggcccgggctggcgatgtacagcgggacgccgcgggtcagcagggcacgcacctgatcggaggaggtctgcgtgcgcagcaccatgttggagccgacgaagccggccgcgtcatgggcctggttgcccttgacatagaaggtgtcctgcatctggcgggcgggatgatccgggccgaagttcagggcgtcgaagtcataccattcggtctccacctcggggccggcggagatctgccatcccatggagatgaacaggtcctcgacgtcctccatgagcttggccagcgggtggcgggcgccgagcgggcgacggttgaccggcagcgtcatgtcgacggtctcggcctccagcgcgcgctgctcctcctgcgccttgagctcggcctccttggggccgaacgcgcggccgaagtcggcgcggagcttgcccataagcttgccggcttccttcttctgatcgaccggcagcgacccgatggccttgctggccttggtcatcgccgattcggcaccggcgtattgcgttttgatggctttgagctcctccaagctggaggcgttctgaatcttgctgatgccctcggcgaccgcatcggtcactgactgggcatcgaagagagcattgtctgccacgagaaccctttcgtcctacctacaactaccgaaactaccggtttatctgcgccaaaaatcaaataatccaagcgtttaccgagttcacattgtccctatatggctcgacatagccatactcatgagcatgatcgcggcgctggtcgccagattcagcgactcggccttgccatagagcggaatgcgcacgatgtcgtcgcacctacccaacagacccggctcaagtccgcgggcctcgttgccgaagatcacggccttgcccaccccggcgagatcctggtccctcagcgcctcgggcagctcccttggctcgcgcccgtccgtcccgtagacgtcggcggcgacggtgcggagcaccttctcgccggcccatccgaagaactcgtccacgcccatcgtcatcacggggatatggaacagcgagcccgcggtcgcgcggatcaccttgggattgagcatgtcgacgcaatcgtcgacgaacaccacggcatcgcatccggccgcgtccgccgcacggataaccgtgcccgcgttgccggggtcgcgcacctgccagaacgccgcgacgaacggcttttcgggcaattgcgtcccctgcgccgtcgcgcgcaccgcatcggcgtcgccgaccgccgcaatgccctggcaatcggggctgatgcggcgcatcaccgcctcgctcgccggatgcacatatatacggtgttcctgggatcgctcgacgatggacgtcagcgtctcgcctgcgatccgcggcccgtccggcccgtccgcggcctgcacataaaggtcacggacggcgccgggcatccacatcaccgcctcgcgaaccgactgggggccctctatcaggaaacgaccgaaacgctcccgggtgcggcggttggcaagatcggccaccttgcgcacgcggtcggccttcatgttgtctatcattctggaatcgatcggcatgactgcaactgtacgcgccaagcgatacagcggtgccgggcgccacgattcggccggctcgccgcgtgcgtctctaacactggactaagaaacgctgtcaaacatcgactatggccggcgaacgggtaacgttgccactatgcaaatgttgttcacagcccgtagggtctcctgcgtcgtgccttctgcgcagtcagaccgcaccatcttcgaggatctgtcgttcgacgtcgatcgcggccagatcgtcgatctggtcggcccgtccggttccggcaagagcagcctgctgaccgccttcgcgctgctcaacccccatgccgacggcacgttcacgctggacggcgcggacagctcatcgttctcgctgcagcagtggcggaggaacgtcgcgtatctgccgcagaagcccatgctgatgggagacagcgtcgccgacacgattcggcttccctggacgctggccgtgcgcagagcggacgaggcgagtgcgcccgacgaccatgcggccaccggcaagaagacctccgcaagacgcggcaggttcagccggctgttccgctccgaacagtcgcaggcgaagctggcgctgcccgaccagctcattcgcaatacgttggacgccatgggatgcgaggatatcgacctggcccgtgcgccgcacgacctttccggcggtcaggcggcccgcgtcagcctcgcgaggacgctgctgacccgcccggccgtgctgctggccgacgaggtggacgcaggcctcgacgacgacaacgcggacaaggtcgcctcgatcatggccagcgcggccgccaggggcatggccatcgtgcgcatacggcaccgtccgcccgacggccgagccacacgcatcgtcacactgtcctcagggaggctgtcatgagcggcaacggttacgtgatcgataattggggccttctggtcgcgctgctgatggtggcggtcgcggcgctcgtctccgagctcgtgtgcatcagcatcggcaagacgctgatgtggtcggcgatacgcgcgctggtgcagctgtgcgtgatgggcgtgatcatcgggtacgtgatccgctccaacaacccgtggctggtgttcggcgtcatcgcggtgatgctggtcgcggccgtgcagatcacactctcccgcgccaagggcatcccgaaggggctcgccggcccggtactgctcagtctggtcataaccatgctgctgatgatctcgctggtgaccgagctggtggtgcgcccgcacccctggtatgcaccgcagctggtgatgccgcttaccggcatgctactgggcaacaccgtgtcggcgctcgccgtcggcctgagccggttctatgagagcatgaacgagcgccgcgacgaggtggacacgctgctcgccttgggcgccaccccgtgggaggccgcccgtccttcgatcgtctcgtccatacgactgggattgctgcccaccaccgcctcgctggcgtcgtgcggcatcgtgaccatccccggcatgatggccggccaggtcatcgccggcggagacccactgaacgcggcgaaataccagttcgtcgtgttagccgccatcgccgcgctcaccctcgtggccgacgcgctcatcatgacgatgacctatcggacctgcttcaccgacaaggaccagtacaagccgcccgaggatcgctgagacgacgggcgcgcagaagcgcgacttgcattgccgctgagccggcggaactcatccggctcagcggcaattgcgttctatgaggatgtcggagacggtcaggttcgcgtcgttgaccagattgaacaggatcactcgggccagttcgcccggatccatgaaggtgtgctgcttctcctccgacacgtagtcgcggctgtcgcggtagaacgcggtgtcgatgccggccacgaaccagccgtcggcgatcagctgtttggtcagctcgtatcccaatcccagtgcactaccagtgacgatagcgatgttgcggccgttcgagttcgttatatcatgctccgatcccccatacaatgtatggtcagagtatcggaccatacagacccccgccgcaccggccacccgattggtcccgcgcagatccccgtcagccggcgaactgcgcggcggatgccgggtaccaccgcgcgaacgacgcgatgttctcctcgccgtccccgtgcaccgcggcacggaccgaagccagccggacggccatccgggcacggacgacggcataataccgggcgagccatccattgatcagttccatcatgcgagtcatcacactcaccttgcctttccatcagggtgtttcaaggatgcagacggtcacatgaacgacaaaatattaatttcgtcattctcgcgatgtccgaatcatcgattgagtccctctcctgcagcaagaagaactgatatctacgatagggatggaatgtaacgacggcaccggcgcaatgatacttttgcacatcaaaagtaatatagtattttcatatacgttacatcacgcagagagcggcaatggggcacttcggtgcacaggcggcgcgaccgggcccggaacctggcagggcgggcaggaagaccatcatcgtctcgtcggatctttcggagcggatcgactacaacatcccagacctgcccatatatgccagacgggacgcattgtcgtcgttcccggactaccgctgcccatgtcactggcatcgcgatctggaattcatccatgtcatcagcggtcagatgcaatatttcgtcaacggcgccatagtgacgctggaagccggcaacggattggtcgtcaattcgaaccggctgcattacgggttctcgccgcagcagaggcaatgctggttcacctgcgtggtggtcgacctagaactgcttgagcggctcggcgcggatgagcgggttttcgtcggcgagctacttcatcaacgtgttccgacggcggcgaggcgtcactccgcgcgtctggcgtgagtcacgctgcgtgggtcgcgtcactgtgcgtgggtcatgtcaccgtgcgagggggcacgcaacgtgacgtaaccctcgcacggtgacacgccccacgcacagtgacatacctgacagcggccacgaacccgctacaggatgtcggggtcgtccttgtcgatggtgcccgtggccttaccgatggccttgagcccgtggtaggcgacgaggatgacgaccgtgccgatggcgatgccgttgaactgcacgccctgaaacgcgaacgtgaaatcggcgatgccgatgatcatcacgatcgcggcgaccatgatattgagcggcttgtcgaagttgaccttgttctccacccagatgcgcacaccgatcatgccgatcatgccgtacagcagcgtggtcacgccgccgagcacgccgccgggaatcgtgttgatgaccgcgccgaacttcgggcacaggctcagcagcagggcgaatacggccgcgcaccagtaggcggcggtcgaatacaccttggtcgcggccatcacgccgatgttctcgccgtacgtggtggtgccggagccgccgccgaagccggcgattgcggtaccgaggccgtccgcgaacagcgcggtgcccatatgcccgtcataatcgcgcccggtcatctgcgccacagacttgacgtggccgacgttctcggcgaccagcaccagcacgacggggatgaacatcggcaggatcgagaagtcgacctgcggaagatggaatttcgggaagccgatccacgccgcgtcgccgatggccgaaaagtcgacctgaccgcggaagcatgcgtacacatagccgacgatcacaccgagcaggatgttcagacgtccgacaaggccgcggaacagcacggcgatgagcagcacggcgagcagcgtcaccagggcggtgtcccagcccttctgccagttcgaccacacgctgggagccaggttgaagccgatgatcgcgacgatggcgccgttgacgaccggcggcatgatgatgtcaatccacttcgcgccggcgaagtggacggccacgcccaccagggcgagcagcaggcctgtgaccatgatgccgaagctggcggccggaatgcccttgcccgcggaggcgacggcggcgatcggggcgatgaacccgaacgacgaccctaggtagctcggcagcacgttcttgttgatgagcaggaacagcgcggtcgacatcgcggtgaagaacagcgtcgtcgacgggtcgaaatgcgtcaggatcggcaccaggaacgtcgcgccgaacatggcgatgacgtgctgggcgccgatgccgatggtacgggtccaggtcagtcgctcatcgggctccacgacctcgccgggcgcgagcgtcttgccgtcgccatgcagtttccatgtgaacaggtttcccatcacgaactccttcggttctctcaggtggcacatccatgcagccatgtgccgcgttgaggccattgtaacccgttcgcccaccgttgcgatgacgagccacgtgcggcgcgcgactcgtcatgcgcggcccgtgagcgccgtgaggcgcctcgtgccgtcacaggtgcgggtcgaccgaatgcaccacgtcgacgaggtcgccgttcgagagcaacgggcgctggaattcgcgccacggatcgacgcgcacctcccagcgtccggtcgactcgtcgaacaccgggcgcgcggtctgctcccagcgcacgcgcgacgacgtgcggccggtggccgggtctcgccgcgaataatgcaggcacgtgcaattggtgatcgcccatgccgggtcgtcggcgcggcgcatgaactcctcgtccgacaggtcctccagggtgagcatcagcgcgagcatgaagtcgccgtgtgtgacggcgacgacggattccgcctcagcacgccggttgagcgacgtgagcaggttatgcacgcggttctccgacacgtcggcaatagactcgcctgccggcggacgccagtacagcgggtcggtgcgcttgaacatccagttgcgcgcgtagttcgtgcggaaatcgtcctgcgtgatggtgttgatctcaccccaggagcgttcgcgtagcacgcgcgtctcctcccacttggctttcggcagcgccatcgtcgcggcggtttcgcgcgtgcgtacgtatggcgagaccagataccggtcgaacagctgctgttgcgcgacgagccagcggccgatgcagtcggcctgcttgcgcccggtggcggtgagtcgccacgaccggtcgggcacggtcacgttgtcctgcgtgtacagggagttatcgccctgctcccccgcgttgatgatgacgttcgcctccgactctccgtgtcggatgacatatagatccaatggcattcccatgaatgcgtttcctcatttcgttatcttgctatgttgctgtgtttgctgtcttgttgcgttgtgtttcgttgtcttctgtcgccgccgtcttccgccgtttcctgccgtgctgtcccctcgtcccgccgtttccgtcatcgtcagagcggtcctgccgtctgccgcgccctgcgggaatcgtaccgcttcgattcaagttcgcggcatggcttcgcgattcctccagattgctccagccttccccacggtacacgcaatcatgccgcttcgcagccgcgctcatgcccacagcgcaacaattcacgcacatgtcaccggtgattcaactgttacccggcgcccgccgcagccttcgtgccaccctgcaggcgtacaatgacgccatgcgattgaaggcgaactgccgggtggatttcggcgacgaaggcgatctgttcctcatgttccacggctacggcaatgacgagcacgagatgatccgcatcatcgacgccgtcgatgccgaagccgactattattcgttccgcggtacgtatgcgcggcgttacatgggtggcaattactggtatccggacggctgcgacgtggagtcgcgccggcacgaatgccgtgtggtcggcgacgccgtcgtcgcgctgaccggctctgcggcctttgccgggcgccgtaagatcctgatcggcttctcgcagggcgggtacctgtcataccgtatggcggtggagcatccgggcgtgttcgatgcagcgatactgctcagcccgtcgttccgtggcgagcaggacgctgaggcggactgcggaacgcgcttccttctggcatatggcgaccaggaccgcacgatacccgtcgaggatcaggatacggcccgacgggtgatatccggaacccgcggcgcgcggctgtgcacgtacccgggcatggcgcatgcgatctgcgaccgcgagatcgacgacatccgtgatttcctgagataggggctccatgccctcaaatacgtcagcgggctgaaacggaggctcccaggccgggagcgcccatttcagcccgctggcaacgcaatgccgggaatcagaagaacagcacggcgacgccggcagcgaacagcatcagcaggatcgacacgaggaagctcgcgaggaacggctttcgccccttgaccgcgatggccttgaagttcacgttgatgccgagcgcggccatggccatgccgagcacgatgtacgcgaagtccacgagctgcggggtgatggcggcgatgaacggcacgaaggtgccgatcacggacgcgccgatgaagccgagcatgaaccaggggaacgcgacggagcgtttgccggtgggcgcgacctcggaatgcttcttctcccaccagatggcgataatgatggcggcgaacacgagcatcagcacgcgcgacagcttcatgatggtggcgatgttgaccgcgttgaaggcgtcgccggcggcgaccgcgtgggcgatctcgtgcagggacgcgccggcggtgatgccgagctggtcctgcgtcatgccggtcagggggccgagcgcgatctcaagcaacgcgaagatcgtgcccatgatggcgacgatggcgacggccatggtcacgtcgtcgtccttctcctgctccttctcgggcggcaccttgatggagccggacaggcccatgacggcggcggcgccgcagatgcccgtgccgccggcggtcaggatcgcgagcatcgggtcgacgcccatcttgcgcgccacccagtaggtcacgacgatagtgagcgtcaccacgaccgcggcgatgggcaggcacttgatgccctgcgtgaacagcacttgcaggttgagcttgaagccgagcaggatgatgccgaggcgcagcagcttgttggagatcagcccggccgcgtccttgacgccggccttgcgcttgtcgctggcaccgacgtaccacttgcggatcgggaactggatgatcatgccgatcagcagcgcgatgatcagcgcgccgaacagtttgaatccggggtattgcttgagccatgagccgatcagtgaagcgatcagggtcaggacggcgatgaacagcatatcgacagtggcgatgcgtttccaccatttcgtacagaactctctcatgatgtccattgaactaccgtcatatgccatcggtcaaatcagtgatagtgatggatggtattgatatttttgatgccagattgcagcgaatcgttctcaataagaaaggtgcgagccagacgcgggcggaaacgaacacaaacacctccgaaagcccggaattccgggcttcgtcggcttgttcacttgtgcgaaaatgtgaggaatcctcgcacgtttcttattgagaaccattcgctgcgacacagtcagccgcgcagggccgtaatgactctgccggcaagttcccgctgccccggcgtcagaccggaacgcggcaccaacgcatagaaccgccgcacgaactcgtctcccagctcccgtgtcggcacgccggccggcacggcggccgccgacaccagggagcagccgaaaccggccgcgagcgccgcgccgatggccgcgttattggcgacctcgatcatgcgagacggcatggagccgaccgtcttgaagtacagatccgtgtaatagcgcacgccggagccgtgctcgcgcaccatccacacgccatgcggatcaccggccagcaccagcctgtcctcgcgcagcgtgacacgatcgaccgagtcgttgacgatgggcttctccaccacacccaactgcacggctttcataccggtctgttccaggatcgcgtcggaattgagcacccgaatcgagcagtcgaagccgctcagcgcctcggccatcaccggcagtgcgactggcagcagcacggccgccgtggtgtgcgagaatgcgacggacaacggctcacggctctcgcgcatgcgggcgatctgctcgcaggcgtcgcgccacgtgccatcgatgccggtcgccgcacggtacagcaaccgcccagcctcggtcggcgtcacatcgcttttggcattgcggacgaacagtggcgccccgaccatgcgctccagttgggcgatgcgcgacgacaccgtggactgcgagaccttgagctcgtcggcggccaacgtgaactggccgatctcgtagaccgcgaccagagtgtccagcaaggggaacatgagccgctcctttccgtcgtgttcggcaacgcctgccggaacgtcagtgcgtccgttccggcaggcgttgccgatcggcttgcatcatttgacctgcgtgatccggttgccgctgaccatgaacgccgttctcgccatgtcgatcatcggctggtcgaaccggctgtcggtgtagaactcgtcgatgaccgtgtccgggccgacgacttcgcggaaccgtttcggcttgttcgtattgaaattcagacaggtgacccgcatcgtccgcggatccacggtggatgagaccagacggttcaatccgagacgccggcatgcctcccccacggtcacgtcgaacgacgccgtcaggatcacgtcatccggacgcggctcataccacggcttgatgcggtccatatgccggttccagaactcgttcaccaacgcggatacgccctctgcgatcgcggcctccccggcgagaccggcatcgggagccgcgccgtccagtcgcagtatccgtcgggaagccgcgacatcgtgcaggtaatcgcacgtcacgccgcccacgccgcgttccatttgcgcaagcgtggcccgccccatcttgtactgcaccgcgtatcgcagcaccggagccagatgccgcagcaccttcggctcgtatcgggcactgaacatatacaggtcgaacaggctttcgccgtcatatatcgtgccgtcgaaatcgaacaccctcatcgcgtctcgttccctctcaccctcgcgccgctcccggcccgtcagaactgcgcatagtccgcatccttatgttcccccgtctcaaggtaccatgcaagatcgtcggacgacgagaacacagcgcgcaccgactgggcgatcatcaggttgatgctgtcgccgtcgcgcaggccctcgcgatatgcgtacacgggaatgcctagagagtgggcgaatccgatctcgaacatcgtgccggaatcctcgtccatcagattggctatcaccgccttggaagcgcagatgccgttcacgtcgtcgtcgaagcagcccgcgggaccgacctcggcgatgtcactggcgaaccgcggcctgaacatcgtcttgccgtgggtgtcgagcacatgctccaagcgttccatcgacgcgacctgctcgggattgaagaacgggccagcgacgtagaaatcgtagcggcggcgtttgcgcgaataggctttctcacgcttgcggccgggctcgcgatcgggttctcgcccgtccgccgcttggcccgcctctgcgcccacatccggctccaccatctcggcgaacgtctgcttcatcgtatccagcagcgactgcgtgctttccggaacctcgtcgcccgctccggcgacgtccttggtgagtccctcgatgcggcgacgaatccggtcggcgtcctgcggatcgatgctgaacttcgccacgagcgactgccgtatcgtctcataatcaaggttgacgaagaagataagctgctgcaacttcatgaagttcttcagctcggggaaccgctcgacgatgtacgtctcgcgatcatccgtggccctcacccagtcgcgggtcagctgcatgctccagtcgccggtgatggatccgcggcgcatgcggtaatggtacagcgcttcgggaatgcgcacgacgcgatgcgactcgccgatcacattgcagatacgggccatgtcctcaatcttgcgcccgacggggaaggagaacccgtgattgcggtagatcgacgccgccgcgacaaacgaccagaaatacccgtcgatctcggccttgacctgcgccttgatcgcctcgaccggggtcatgatgatcacatcgtcataatggttgtgcttgtacgaggatgtcagcggcttgccgtcttcgctgatcgtgtcgaactggaacatcaccaaatcggcgtcgtagtcgcgcatcgtcgccatcgcacgttcaatgagattgcgctcgaccacgtcatcggaatcgacgaagtagatatagtcgccagtggccttcgccagtccgacattgcgcgcatcggacaggccgccattggccttgtggatcacgcggatccgctcatccctcgccgtccacgcatcgcacatcgcagggcagcggtcgggcgacccgtcgtcgacgagcaggatctcaagattgcggtacgtctggccgaccagtccttccacgcacgcgtcgagataccgctcgactccgtacaccggcacgatgaccgacacgagcggcgtggccccgtcaccattcatggcctccgccatcacattcgacgatgattccgattccgctgacatgcccctcctcgatgctccccggtccgtccggctccactcactgctgacgcacggcggcacgtgcgtcgccctccattgtccatgataggccagggcttgcgcagggcggacgactccatcctgttgtttgccatatcttaaccgcgccgctcaaccgtgccttttacccgcgcggcaacggcggcagaacgccatgccggtgtgcgtcggccaccggattttccatccgccctgaggtcgcgtagacccctcccgtcagtcttttgacaccatgcagcattttgccgagccccgcaaccgatcaccgtggcgggatgctttttgccgtatatggccgtcagcggcgacagcgcggcgatcaagcagatgctcaacaacatgtccagcgaagagctcctcaaatactatgacggggacagctcgatcagcgcatcgctgttcagcgatcgcacattcccgttctgggcgttcctcgtgctggcggcgttcatcctgttgttcgcgctgcttcgtctgcacgccgccacgctgacgttctccatcctcaacctgctcttatgcgctttgtacgcgggaatactcatcttcattctcgtctccgcctcccacgagatggatgtcgtacgctcgacggcatctcagcctgggctgaatctcgccaatgacctgtccttttcactcgttccgtcgtatgggatgtatgcgatcatcgcgggaacgttgttcatgttcgtgggagccatcgtttccgtggtgaatcgcagccatgcgcgcagggcggcattcgccagtccggctccggcgaatccgcccgcagtcgcgtacggtggcatgccggcgcaaaactacggagccgcgccgggcgccggagcggcgtatcagcagcctgccgtgccatatagcgcgcaaccacagaatccggccggaggaacgccgaacacaatgcgtcccatgccactgccgccgcaacactaatccgcacaaccccgcagactccgctgacatccacaccgaatcagcggagttcttctatgccgccagacgccgactggcgcaacggcgcgactcgccgaactatggttccgatacgggccgcactggaatatcatggtgtttatagcaacgctgcgagagaggtgggagatcatggaatattgtccgcattgcggtgccccatatgacgagggcagtcggttctgcttccagtgcggcgctccgcggcaatccgccgctggagcgccgggtactcctgcgataccgaccgctccgatacccgtgtcgggctatggcaacatggcggcgcagccaccggttccatcgcctccgagagcatccgagacggcatccgacgatggttttgccgcattcgcagcgaatgcgggcgatgccggcacacctccgaccgtccccgccggaaactccgccacgccaccggccaatcccaccggatccgccgccgcgcagccgtccgccaagcgcccacgcatgaaactcatcgcggcgatcatcgccgtactggtggttctcgctggaaccgggttcggtctcgccgcgaggaaactggaatggatcggcccgcgcaccgtgccgacggtccgataccgcacggcagccgaagtgtcacgtgagctggagaccaaaggctttctcgtcaagaagaagcagatgttcaacgccctgggcaagggcaagtgcctcggtctggtaggagtcaaggcgggcgaccgtctgcccaagggcacgacggtgacggtcatcgaatcgatgggacccggtgtacccgaaggcacagtcggctctgaaccgagcaaggccgaaaccgcgctactgaaaatgggtgtcaaagtcgtcgagcacgaagtcgtctcggagcatcccggcaaagtcgccgtcaccatgcccgcggacggtgagccggtgcgcgacaccgacgacggcatccatatcggagtcgggatcacaggtgacggcatacccgtcgaaatcgccggaatggacaaggacgaggcgaaaacaaagctccagcaacagggcttcgacgtcacgctcaagccgcgtttctccagccgaaagaatctcggcaagatcgtccgagccgatcccggcatcggcgtgcggaccagcgagaccaacgtgaccctgtattacggcgtggatgccagcaaacgctacgacgtggtcggcacgtccattcccgacaggggatcggacaagttcatgacgaacaccgtggctctggcagggaagtattgcaccgatggcggcaactgcctgacattggaacccggtcagaccgatccaaacccgagtggtctggtgctcgacggcaaaggttcctcggatttcttcgaccagctgaccctctgcacgtattcgcaggacatcagcggctgcaacccgtcctccggcggctactacaacgcaatgaaggacttcctgattcagggcgataccggcgccatggagctgtacgcaggcttcggactgcccgtatgcggcaccacgtcttacgtgggcgacgggccgacatactgtgacggcacatcggagaaacaagtcgaggatggctcggatggaaccgccgaacaggccatgagcgaaaaatatctcaaatacgtggctcgtgatttcttcgtggtgatgccggtcggagccgacctcgaccagctggaatccaacggatatttcgacggctcgactacgtacaagccctatgcggaccgcccgtatctcatccgccgcgaaaactccgcatacccggaaatcaaggcgacgaatgacgccttccaccggaagcccaacccgtacgcgcccggcaccaacatgcagccgttcaagaaggcgcccaacgcccacaacgtgtactatctggtcgagcagccggtcgatttcagccagttcaaggaagccaccgtatccggcgggcggcagggagacggctccgactcgtcgcctgacgacggcatctcttccgacggcaacggcgatgataccactgaatccgatgactcatcgcaatcccagtcatcgcaatccggtgcgagaacctacacgaacgcgcggttctcataccgtgtcgacgtgcctgccggttacaagtggcagcaggagtccgacaacggcgacggtcgcaagttcgacgcgacgtccggctccgcgcagatcagcgtgtggggcagcaacaacgcgctgtctcactccccgcaggaggagctcgactggctcaaggagaatctcggcggcaacgcgaacatatcgctcgcgcaggtggctggccaatcggtgtacctcagctatgagcagaacggaaccatcacgtatatccgcgaagtcgtcaccggagggaagatcgcggccatcgaaatcacgtatccgaccagcgaacgctcaagcggagacaaactcgcggagacggttccgctgaccttgaagttcgtggggtgatggggctatcgtcaccagatgcgaggccgcacgaaaccgttgcgttccaagaacgcggcgacgtcacgcagctccggcatgttgatgctgtgcgtcatgccggggtagattttctcggtgagcgtggtgtgcgaggcatagaacgcgctcatcgcgtcgagttcggacttggggaagatgtcgtccgcagagccgtggccgtagaacattggcgggttcagtcgcgcaagctcgtcgtcgccaggcaactcgccatgtgcgaggaagccggagaaactgactgcggcggcgtaccgtttcgggttgacgcgcagcatctcgccggcgagtagaccgccttgggagaagcccatgaccacgatggggcgctccggggcgatgctgtcggccacccatgcgtcgatggcctcgccggcttggcgtgattgccgatcgagcgattcgccggtcgggacgccttcgtaatcccatgagccgaaccacgtgtagcccgggccgtacgaaatcggcgcacgcaacgacgcgtaatcggcgccgggcgcacaataatccagcaatcccggcaggtcatgctcgttcgacccccagccgtgcaacagcaagaacaccgggccgcttccattggccggcagactggccaccgcatgttcgatcctcatcgcgctcactcccctcttgtgtgttcgtgttttgcgttcgccaccggcttcagagcggccgacgaatcacgtttcaatgtcatgttccgtcacccatggtagtcgcacgggcgccggcagtcacaccatcgcgcatcccccccactccatttcatcatctcatcccgccaaagtcccatctcaaggtcgtcacatgggactttcgccggatgaggggtcacgccgcggcacggacatccgctcatagtcccgcgggaaagtcagccaatgggactactcgcggaatggaggctgcgggattgcatggcgtaccatataactcgacatcgaatccggcgccgcaacaccggcatccaccgacgacacgggagtatcaatgcaacaaccgatcatgacctccgtcgcttttctgtcgcaggcatcggcccctgccgacccgtcgaacgacgaggaccgcgccaccgcgaccgacctgcgtgacacgctggcggcgcatcgcggcgaatgtgtgggcatggccgcgaacatgataggcgtggcaaagcggatcatcgtgttccaagacaaggaaaacaaccgcaacgcaatcatgttcaacccgcgcatcattgctgggagcgacccattcgataccgccgaaggatgtctgtcactggatggcgaacgtccgacaacacgctaccagagcatcaccgtcacctatcaggctcgcagcgggcgcgaatacacgactgccttcgacggattcaccgcgcaaatcatccaacacgaaatcgatcacatcaacggcatcatcatctgacgaataatgacgatcatcgcgtcatatcgccgaaatcgacaatgtgacgcgtcacaaagcacaccacacactcagcccaactggtccttgatgccggacggcagatgcgtggtgacttcctgctgaatgcggtcaaacgcgctggacagcagcagattacccggaaccgtactgatcaggaatgccagaatcgcggcgatgaccgccgtcaccagacctttgacaagatgggcgacgatcttgaacaccagataggcgacaatcgcgccgacgacgacggtgatcgcggtttgagccagctgcggcagattgccataccacaggacgaactggtcgaatccggaccgcacggtctgtgatgtttgagagatctgcgagttttgagcaatatgcaaggacaacacggcgtgcacgaactgcatgtgcgaggtcagtctcctttgccggtgagtatggtggttgtttgatgatatcagcctgatcaggcctcccgtcatgtgccggtccccgatcgggccgggatgcgggaggtcccctatgccgtcatgacgtcagccgacgaggaagtcgaggacgttcatgccggtgccggtctgcgcgcgatacaactcggtgtatccgcactggcggcaggagatggtgacgaacttcttgttctgcacgttgaacagtttggcgaaatcgccgccggtcgcctggaactggtcgctgtcgtatgaccggcatccgcatttaacgcaaacgtactgaatctgctgcatactgaattcctttcatcggaacctaacatcccccgatagtggttcaccctatcagacaggattcgcccgattgccggttatcccgtatccgcacgtaacgcgcatacaatcaacagaatcgtccgcgctccttcgcgatgcgggcgccccatatcggcatcagtgcgcatcggagaagaaatcacgctgaaaaacgccaacagccgacaaatccagaggctatcttcgtttcgaggggttgattcggatgcgtcaaaacatctatctgcgtttcgagggggtggtgctcaagtataaacgctcccaaaaccgcatgattccagcaacatacagcttcgaataccctgcatatcgtgttttggcaaccccttgaaacgcagatagatgttcggagagccccgaatcaaccccccaaagttcatataccgtacaaatcggcggatcggatgtcctcagtagccgtgcgcgtgcagataatcgtcgtcaaaaccgaaataatggccgagctcatgcagcactgtcttgcgaatctgccggcgcaggtcgtcgcgcgtggcgcagacgcgctcgtgcgggcccttgtatatggtgatgatatcgggcatgacgccactgtatccggtgaagcgccgcgtgattggcacaccttcgtacaggccgagcagctcatcgcactggcgctgcatcgtcgcccgctcacgctcgttcggctcgtcggcgaccgcgataccgacattgtccagcgcgcgtttgaaccggtccggaagactgtcgatggccgtttcgacctcgtgctcgaactcctcgtcgctgatgcgcattccacagccttccttgtcattgaacagtcgccttgcccaccacgatcaggcggatgccccggcacaatcgggagcagtctgactccatgttccaagcataggacggcgtggaccgatgcgccacatagaccgtacgtcacacgaccggtatacgcttcagtcattcgtaacgtacactagtgactgtgcgaaaggaggtgcgcattggcgacgtcggaaatcgaacagttgtggatcagccagtttcaggagaatctgggggcgcttcgcaaagtggcgggatggaccacccagcagttggccaacgagctaggagtcgcacggcagaccatctccaatctggagaccggccgaagtcccatgaccaaattgcagtacctcgctctgcgaaccgtgttcagcgccgaaatcgccgaatgcggcaaccgcgaactggcgaagatcatcaagacccttgttgacgatccgattgaactgcgcatcaaggagcttgggacggccggttcgtccgacgatgccaaagagccgaccgatgagacggccgacaataccaaagcaaacagcgctaccgagcctgacgctcccagcgaagcagacgatgcacggcccgtcgcaccggcatccaagccggctgccggcagacgggcacgcaaaaacaaggaacgaccgctgagcacggccatgcaggcacttgccgtcatcaccgcggctctggccagcggcaccgccgccggcgttctcacctatctgctgtttcccaacggcaagcccggcaaaaacggcagacgttgacagagcggaccgcgctgcagaccgcaacaaggccgatcatcgacagtcgtactgattcggcatgacgattcgtgtctatttccgttgccacgaacaatgcctcatctcgatcaacttccggaaaagtccgggattctcttcgcgcatcagcgcggctgcgactgcatcatgtggcggcgcgtttgaacagagaaatataaaactcccggcatatgaaggcaaggctcttaatgcaccgggagatttgacgattcgttacggcagaaaaacgttacaggcctaggacttcatgcttcttcatgtcgaactcctcttgggagaggatgccgatgtcgacgagttccttgagcttcttcaacgtttccacctgttctgcgacgctcatggaggcggcgtgcgagggcgctgccgcgccggctccggaggttgccgtatcggcaccgcccgtgctttcggctgcaagtgcggtttgaggctgcggctgctgcggttgcggttgcgcggccatcggcatcggcgctgccggcgccgcggtcatcggattgatggcctgagccatgttcatgccgaggagcatgccgccgccatcaccgaaaccgttgttctggatgccttgggcgatctgctgctgcgcggccatgttgccggccgtctgcgagacgccctcgtacgcagagacattcatcttgttcgaagcgaattggcgcacgagctggcgagactcctcatcgaactcgatgctctcgatgccgacgccggacacctcgaatccgaagcgattcctccacgtccccgcattcgtctcatcgttgcgcacgcgtgtggcgatatcgttcgcatgggccggcagctgcgaaattcgatactgatcggacaacgagttgatggcgacgatgaacgactggacgaattcggaaagaatctgttccctagccttgggattgtcgaacgcgtacgacgttacgttggcgggaacgtaattgcgcacgaagcgaaccgggtcggtgactttcagtgacatcgtgccccgcgcccgtatctccaaatccacgccatagaatttgtcattgtagaccagcggcgctggagttccgaacttaatgccgcggatctcacgcaggttgacgaacgccacatacttcgtctccaccggctgcccgccgaatgtgaatcgactggcgaccgagctgaacagcgatccgatgccgtcaccggcgagcacgcttttctcgccgtcgcggtactcgtaaccgcccggctcggtaatcacgttctcgatgccggattcagagaagatgaaggccgccgtgttttcgggcacataaatgtgggaaccgttgctgatgacgccttcggaaccgtactcgttcgacccgcgtccgttgttcgtgcctcttgggactcccggtgcgaccactacatactcgtcgaaccgaccggcagtgatgatgtctttccatagatccgcgaacgttccgccgagcgcgcccgcgaacgccttgatgattgccatgtgctttctcctcgtcttctcgcgcaagcgcggatgcgccgccatgcgtgttgcctgcatgacggcgcatccgcccagcgcacaggttcggtcggttagttcagctgcgtctcgcgattgcagtattcgcagcgaaccgcctcgcgcttatggccggacagcggcgcgccgcatccctcacaggttcccgacgaccgcgtctcggcgatgccaagcccgttgcgaaacgcgccgaacgtgtccttcaacgtaccggccagcgcctccgtgccgggtatggccttgctgaacgcctgttgcttgttttggatctgatcgagaaaacccattgctgtccttcttccttatgtggattggcggagtgccgaataccgcgtcactggctgacggacgcaagtttctgcgtgcatcgagccatgacctcgttgtagtacgcgagatcgctggcgctgagcgagccggaatcgatggaaaattacttgaattactcgcagatgtatcagagcttgtgctggtatctgatgtagatgaatcatcaggaccgcgcaggcttatcgacatgatgtccttattcgactcatcatgtgaaatccttacggaatagccatccttggtctcacctctaaaccatccgcccctgcgtctgtaatctacagtgaagcccttctcaagaacagcatcaatatacgcggcatactgttcatcattggtatcacacacatcaatagagagcatgtcatcatgttcaatgagattgccaccagtcgtagatttcggggttggaagtttggtgccaatattggtttttggccaagagaaagctttgcgctcaatttccggtgcggcggccggagcggccttttcgagagctccggagacaacaatgcctacactgccaatgacaaaacccaacactgtaagtactgcggcaatccaagcaaacagctgaccagtcaccttgccgccgggacgtgttacatacaacgcagcaaatgtcagcaacaaggatatgaacgccatggagaacaacattccccattccaatgtcgccggcgcgaacgtgctcagcaccatcaggatgctgtatacaagtgctgcaatggcgagtttagagcggttaccggaagcgccggtgaaccgaggattattcaaaatcttccaggccttgttctccttcttcggggcattcgccgcatcggtgggtgccgctgtgggcagagcaagtgccggatcaagaacagacaggaattcagcggtccgagtgccaccatcatcaccggtcacgtccagtttgatggccgtcccgtcagcaccctgagcgctggccttcagcgtgaattgtgctccgtcatatgcgtggaatgtcaccgttccctcagcgacgttctcttcatccacggtgaacgtggcgctggtggacagctggtcgtggacggcctgcattacctgctgcagactggtcgcatacacacgatcgttgtacgacggagtctgggcgggaacatcttgaactggcggcattgtctgcgtcggcggcacagactgttcggtcggaggaatgaattgggtgggcgcatcattactgcccgaagtcgttagctgattgccgccggcggggaagggtgccggctgttgactatcgtttgtcatgattttcttcttcctctttctttgccagcgacatcgccagcgcgcaaacggcgagacatgcgagcgtgaccgccagtccgacctcgatggcaaaccggctgcgttcgttcattgtcacatccttctctcgtcagccgcttgatgtcgctgtactcctcgattagtgtatgtcactgtgaatatgtacgcaaattagcattatgtaataagtttagctagtcaaactgagttgaatccaccctttccgccacgtgcccttacggcagtggcaacgtcaattttcaggatggcgacatggccccgcatcagttgccaactgatttttcctccggcgtttcgccgggcgagtctcgctacgctgaatcatcagaatcacacgacatagcaagaggagcgcaacatggcagacacccccgaagagcatctgaccgaagagctgcttgaccggctgcttcacagtgccaagatcgaaacgtatctcgacgaggagcacatcacagatcgtgcgttgcccgattatctgaacgaactgctcgacagaagcggaatcaagcgcaaccctctcgcagaaaaaacaggtatgaatcagacattcatctacgatattttcgccggcaaatcccggccgggaaggaacaacgccatcagactcgcgttcgggctcgggtgcgacctgcacgagacccagcggctgctgcggcttgccggcgtgagcgagctctactgcaagcagcggcgcgacgcaatcatcatctggtgcattcagaacggccgggaccttcccgctaccgacgatgaactgtatcggatgggcgaggataccttggtgccgaaggactagtgcggggaggtagctggcgacgcccccacccgcttcgcgggagtccccgccagcgggggcgaggttcttagcacatcactcgtgcgcttgtctccgccagcgggggcggaatcttaggccctggagcatgtcgatcgggaacgggttaggatagcgggtaacgaccaggactggggagcaagatggacgataggcagaccgcgcacgcgatggggatcgacgacacctaccgcgtcgagcgcacgctcgctcgcggtcagggcggcgtcaccgaactggtcagcatcgatggcatcggtccgttcgtgcgcaagaagatcccatcccagctgacccaacgcaacgtatgggcggctctcagcgcctgcacgaacccacgcctgccacacgtcgaggcaacatacgagttgcccgatcatttcgtggtggtgtatgactacgtatcggggcggcctctggagcacgtcgttcagcaacagggaaaacttcctgagcgcacggcgacacaactgatctgccaactgtgcgatgccgtgaccgagctgcaccggcatggcatcatccatcgggacatcaccccatccaacgtgattgtcgccgacgacggagcgcatctggtcgacttcggcatcgccaggaccgtcgcggcgaatgcgacgcacgacaccacggcattgggcacctacggtttcgcttccccagagcagttcggattcgcacagaccgacgcccgatcggacgtgtactcgctgggacggctgcttggatacatgctgaccggcgtctaccctgacgacaagcgatacggccagctgctcgccgacccccatgtggtgccatcccagctgaagtcggtcatcgaccgggcgtgctcattcgaaccgagcgcccgtattcaaagcgccgacgaactgcgccgcgcgatactgggacagcctgcacagcaaaatgagaacatcgccaggcccgccatcgtgaacgtcgcgccgcaatcggcccggaagcgctccaagcgcaaggcgattatcatcggtgccatctctgcgattctgatcgccacgctcatagccggcatgctggttctcggcaatgtgttcaaaaccggcaaacagtccacgccgaacagcagcactacgtcatcatctcacagcaatacgtcagacgcacaacagatgggcaagaatggcacgaacgacagcaatcagttcaacggctccgcgaacgggcagacaacggatggagacagcactgacaatacgcagagcgatacaacggagaacccgctgaaaatcacggaatcagggtggtcggcggacagtgccggctatatccattatgccgtcgcggtaaagaacaccagtagcaccttgcaggtcgagtttcctgcgattagcatcaccgggcgcgcgaaagacggctcgatactgttcgctgaggataacctcagggcagtatcgttcccgaagcagaccatatatcttgtcggacaagctggcaatggccccggaagcgaaactccggaaagtgtggaattctccataaaccaacgtggcggcaccgatatccggcaatcgcatggtgtcgtcaccttcacaacgtcaaatctctcggtgtcgcatgatagttttagcaataccttattcaatggagagatcgaagccaaaaacaccggctacgattccattctgaatggagcgtatgtgacagtcgtgctacgcaacaagaaaggcgacatcatctacggggatggccagcctatcgattcgatttttgacagaaaaacgcattccttctcaatccctatagacgattgtcccgattatgcctcgtatgagattcatgcgtcaatttgatttttgatttgccggaaattcgacgccgcccattgcgtatcacggtcatctcaccactatgccgcttgccgctccggcgatgtaatcggagcggcaagcggctacgcaacaatacaggtggcccgaattatcctcagccgcggttgtcgaacatcgacaggagcatcttgctgggttcgacggcgtagacggtgtgcggcaggcgggcgctcaggtagacgacgccgccgggtacgagttcgacctcgcggccttcgccgccgacgcgcagtttgccctcaagcacctgaatggtcaccggcatggcggccgtatgctcgctcagcgcctgatccttgtcgaaaccgaacagcacgacacgcaggccgtcctcacgcatcaccacacgcgagacggtggattccggctggatctcgatcagcgatgcaagatcggccacatagcccaggtgtggttccgtggaaatggcgtggccttcggcatcgtgcttgcacgcgcagtgcttgggctgctcatcgccggcttccgcggcatcaccgtgcttgcacttgcaatggtgcgcttcgccttcgccggcttccgcggcgccgtcgtgcttgcacgcgcaatggtgggcggccggctgctgagcggccgaagcgttctctgcggctgcctcggccgcggccctgcgctgacggcacttgcagtgctgctcgtcacgtcccgcctcacatgcggactgctgttcgttctcatctgccatgatgttctccttcgttacgttgccgtatctttttgttgcgcgttcgcgccgcatattgctgcgcggacgcgcatccacgtatatcagtgcatatcaatgtcggacgccgtaccgggcatcgaaccgcggctgatcttccgacaacatccaccatcattatctgccagcacggccgccggcggaatcatccgcccggctgtcggccggcgcatcgtcacttcgcgggcttgcgcaccacgaacgcaatgccgttgagctccttgctgtacttgtggaacgtggatttcatgttcatcacgcgggcgcggatgtccttgttccccaacatattacgcaggatgcgcagcacgccgccaagcccctcatcggcgagattgcggcgcatatccagcagcgccatcggctccttgccgctccacagcacttcaaagccctcggattccagcagctcgcgccactctttctcggtgagaggacgggcgttgaccttgatgctgcgggcgagtgccttgcgcacctcgtccttgaccggctcaggcagatcgtccggctgcagcccaagctcgtgaatcgaataggtgccgccagcgcgcagcagacggtaggcttctgcgatgatggcccgcttgccgcgctcagtctgcatggtaagcatcgcctcaccgatcacggcgtcggcgctttcggattccaaccccgtgtccgctgcgtcgtgcagagcacagctcgtcggaatagacggtgcattctcggccgtcagcttggtgatgatgtccaccacctgcgggtcgcggtcgacgccgcgatagcttttcggcttgcgctcaagaatgagctgcgtggtacggccaaggccgggcgcgaattcgacgacgtccttgccttccaactcggttttcgccagcatgcgcccggtcagcttcttgccgccagggcgcagaacgcgcttaccgatgcgggcgagcagccagtgtccctgcagatgctccacatcacgatctgactgaggcagcggaaggctaccgttcccctgcgcattggtcgtggattgtggcgctgtattcgtagtctgagttcccatatcacgcgacactatcggcgatgcgccccatgcacaagggttttcggtcttttatcagcgtaatgtgattgaactcactccgaccggcggaatcggccgagcagcatttccgacatgccgacggctacgtcttgtgtgaagaaccggtcatacaggcactcgtcagtgagccatcctgttgacaatatgccacaatgaaaccagtgcgacgatgcgcggcagatcattcaccagtcacgtcatccgcgcaccgcacgacaacaatcggagacaatcgaggacaggaagaatgagagttatcagcaatattctgtggattatcctaggcggtctgatcatcgccatcggctgggcgctgatcgggctcgtgctgtgcgtgacgatcatcggcattccgctgggcctccaggcattcaagatggcagggctcactctgacgccgttcggcaaaaccgtccgctacggtggcggtgtcggctcgacgctggccaacatcatctgggtcgtgctcgtcggcttttggatggcgctcagttacgtgggcgccggcctgctgaactgcatcacgatcatcggcatcccgttcggcatccagtcgttcaagatggcgaaactggcgctctggccgttcggcgcggacatcgtcagcctgtgagcgtccggctcgcaggcctcatacggcggtctgcctataccgttccttcctcaagataaaaaacggtcgagccgccgtcatcccattcgaccttctcctcgcgcctgtgcgtcaggccgcgacacgtataaaaaccgacattgcagccggtgtcggtaaacaaatagtaccgccggacgccaacgcggcggaaccgttccagcagatcatcgaacaggaagccgcccactcccccgccacggattcgctcgtcgaccaagaagagcgtcacctcggcgtcgtatcggttctttgcccctcgtatcagccgtctgtcgacacggttgatacgcagcatttcagcaatgccggagcggcctgcggtcgaaaacagcaacgggaacaatgtcctgatgatatgacgatggtgccggttcggcaggaggcacaatcgtttcggaacattgatgtcgacccgcgccaatatcacgcccaccggccggccgtgcagcaccgcgacggtcgcctcggaagagcgcgccagacatgaatggaagtccgcctccgccagccgacgggaacaatcgctgtccgctttttggccgcctgaccattcgctgtaccatgtacgccgcagaatctcgatcagcgcaggataatcgtcgcgccgcaaggtgcgcagacgcactgcggggcgacgcggggtcgctgctgtcgatgacgatgctgtcgaaaccgcggcgaccgaggtcacatccgcaatcgtactcgaggaatcgttcataccgcaatggtgacgtggcaccgagacgttgacggagcaaagtgagacacggcgaggcgggacggacggaaacgcagcacaacgactctcctgccgagacacgcctggatgtgtcacaaagccgtcagagccaatcgccaagaatgacggaacagagccccgttctttcaaaagtcacacaacaagcttgcgactacgcctccgtaaaggtcatcgatgccctaatccgacgcagcggatacggaaacagagaaatcgaccgtctctgcgatggaacgatcacatacggacgcatccgagacattcgcaatggccttgaggctcctgtgcgtttgcctgagtttctgcaggcgcggtgatctcgacttcgcggcgcatgaggatgggcataagtacgatggcgatgaagacgatccggcgtaaagccggatgtggtgccgtgcggggcttcgtccttcatgtctaatcgcgattaaattgatattaattatgccatcggctacttctatttgacctatttctcgtcttatcttatagtttctacaactaaaagcctaatccggaaagagaggcggaacaacgggcatgaaatataggagtttggcgcggtcgttccatgccgacaggtccaatgacgccttcaacaaccatgcgaagcttgcccggcaacggctcgaggcggactccacattcaggaccggggtcgtcacccctctgggcgaactgttcgccgccacaccacgcgagacatccatgctcacggaaaagatacttctcgcggaacggcgggtatcccggctctggaaccaaatccctggcgtcatgcgctgggactacatacggcactccatcagcgaggaattgttcgccaccaacgagatggaaggcgtacgcagcacccgcaaggaaacccaggaagccgtggaagcggccgacaaggcgaggaaggacggcgacgaccccaaggctcggttcagcgaattcgccaagctgtacctgaacctcaccgacaaggactccgcactgccggcgggaatcgccgacatccgcgacatctacgacaaggtcgtgctcgacgaaatcaacgagagcgacaagccggacggcgaactgttccggaaaggcgacatggaaatacaaggcccgcacggcctcgcgatccacaatggagtcaaaggcgaaggcaacatcggcgcactcctcaccgacatgatccatctcgcgacctccgacgagattccccggctgcagtcggccatcatgtcgcatttcctgttcgaatacgtccacccgttctacgacggcaacggcagaaccggccggtatctcctggccctgtacctgaaccacgacctaaccatgcccaccgtgctgtcgttgtcccgcaccatcgcggagaacaagaacgcctactacaaggcattcatggaggcggaggacaagctgaactgtggcgaactcacgctcttcgtgaacaccatcctcggattcatccggaaggcccaggacgagctgatcgacgaactcgaagttagagtcgaccagctcgacaagggccgggcggtctgcgaccagctcgaacggaagcacggtctgtccgcgaaggcggtctcgatactatatggcgtgatccaggaggagatgttcgactcgaccaagtccatgacgctgaacgatgccgcataccatatcagactatccaagcaaagcgcgagaaagtacgtgggagagctcatggacgcgggcctcgccatccaatccgggaagcgcccactgaaaatacgggcatcggaatcgttgaagggcatccttgaggccggaatgggcgaggacgccggagagcatggcggcaaaacccaacaagaagaaacagaaaccgcccacgagggcgatcccgcataactcaactatccggaaattccggatagttgagttatcatcaaacatcgcggccggatggatggtcaaggtttatccgctgcgtgaaacgtcgagtgagacgtgtttctcgcggcggaactcccacgtcccgtccgcgcgatggacgatgccgccagatcccttcgtacgtcgtctgccattggccgccatgatattcctccctgtcgggagcgccttcgggcatctgccgcaagcgccctcccaagggcactctattggcactctatccgggccacaaacggccagatacgtggcaaaaacggccattccccagtaatcgaaaaacggcggaatccgcacgtgtccggagaccggaaacgttgatattccgccgtttttcagggctgcaaccccctacttgctcacgttgaacttgaactcgacgatgtcgccgtcctgcatgacgtagtcgcgtccctcctgacggagcttgccttcctccttgatcttgaccatggagccttcggcggccacgaagtcgtcgtaggagacgatgtcggccttgatgaagcccctttcaaaatcggtgtggatgacgccggccgcctgcggggcggtccagcccttgtggatttgccaggcgcgcacctccttgactccagcggtcaggaaggtctgcaagccgaggatgtcgaagccgacgcgggcgagctggtcgagaccggattcggacagcccggcgtcctccagcatctcgcgggcgtccgcctcgtcgaggtcggtcaggtcggattcgaactgggcgttgaggaacacggccggcgccggcgccacggatgcggcgagcttggcctgcaactccttgttggcgagctcgttatcgtccacgttgaacacgtagatgaacggcttggcggtcatcaggtgcaggtcgtagatgtcgtccttgttgatcttgcctgcggcggcggcatggtcgatggtctcgccggcttcaaggatctccttggccttcctgaccgcgtccatgtacgcctgctcgatcttcttgccgcgcaggtccttttcgagcttcggcagcgcgttctcgatggtctgcatgtcggcgaggatcagctcggtgttgatcgtgtcgatgtcgtcggccggatccaccttgccgttgacatgcacgatgtcgtcgtcctcgaacgcgcgcacgacctcgcagatcgcgtcggcctcgcggatgttggccaggaacttgttgcccaggccttcgccttcggaggcgcccttgacgatgccggcgatgtcgacgaaggtgacggtcgcgggcacgatcttctcggtgtgcaccagctcggcgagcacgggaaggcgcttgtccggcagcggaacgatgccggtgttcggctcgatggtggcgaacgggtagttttcggcgaggacattattgcgcgtcagcgcgttgaacatggtggacttgccgacattcggcaggccaacgattccgatagttagagacatagtatccagtattggtgtcaaggtggacgttggccgcgccgatgacgcaattcgttgcagcgaatcgttctcaataacaaaagtgcgagtctcacgctcggcaaaacgaacatgaacaccgtatattgcccggaatataagggttctggacaatgtgcggttgagtggttttgttcgttttcctcacacgtttcttattgagaacgattcgctgcgattgacagacagcaaaaacgtcacagctcggccgcgccgatgcgccgcactgcctcgcgcagcagcgattcgtccttcagcaggctgagccgcacccaatccttgccgacgcggccgaagcacgtgcccggcagcccggccacctgcgccacgtcaagcaacgcgtcggcgaaacgttgcccgctccacccctcaggcgctttgaaccacacgtagataccgccggcggagtcgaacacgtcgaatccgagcgagcgcagtcccccggcgacgatctcgcgccgcccggcataccgccgggccagttcgtcgacgcacgactggtcgctgttcagtgccacggcgccggcatcctggatcatgccggtgaccatcgaacccatctgataatggtattgcttgagccgtgcgaccacgtcccggtttccggcgacgaacccggccctccacccggccatcgcgtacatcttcgacagtgaacccacttcaacggacacgtcggacgcgcccggcaccgtcagcaggctgacctgctggtcgctcacgccgagtcccgtgtatgcgaagtcatgcacgatgaggaagccgtaccgcttggcgagctccaccgcgtgctcgaagaatgacgccggcgcctgcgcgcccgtggggttgttcggatagttgagtatcagcatgcgcagccggcgccacaccgattcgtccaccgcgtccaggtcgggtagccagccgagttcggcgcgggcgggcagcagtatctcctccgccccgtgcatgacggacatgcaatggtacgacggatagtaggggtcggcgaacgcgacggcgtcaccgcggtcgatcagaatcgcgaacagtccggcgagcccgtcgaccgcgccttccacggcgaacagctgggaacgccagtccagttcgacaccatgcacgttgccgtaccagttcgcggcggcctgcaggaacgccggcttaccatcgaacggcgtgtatcgcgcgttgagcgggtcgtcgaccgacgatttggcgacgtcgcggatgaattcggccgggtatgcgtcggggttgcccttcgccagatcgatcacgtcggcgccggacgccacggctgcggcgaccttcacgtccatgtcggcgaacacgttcggcgggatgatctgggcgaccggcgcgaaccggggtgcccatactccatcgcgggtgtcgtcgtcttgtgcggcgctcattgcggtattgctcctttgggatgggggttatataggaacggaaaaagaggggacatgtggcaaggaccgccctccggcgttacgcgccgcatgccgtcgccccgctggcgaaggactgtcggcgtagccgacttcgggcggtccggggaggaagcgaatctcagtgctgcagccgcttggcgagcaggttgcagatcagctggctgacgaacacgatgacgagaatgatcagtgtagccaccagcgtcacgtcgctctggaaccggttgtagccgcggatgatcgcgaggttacccaaaccacctccaccgaccacgccagccatggcggagaaggcgaccacgttgatgaacgacagcgccgacactcggatgatcggcacgcgcccttcgcgcaggtacacgcgccatatgatgtcgagcgtgcccaggccggatgccttggccgcttcgaccaggccggggtctatctccagcagcgcgttctcgacctgccgggcgtagaacggcacggtcgcgcccacgatcggcacgatcatcgcctcggtgccgatggaggtgccgacgatcactcgcgtcacgccgaccagcagggccatgaggatgatgaacgggatggatcgcacgatgttgacgatcttgtcgaggatgttgtagacgatcacgttctgcgtgagcccgccgcgtctggtaagcaacagcagcagaccgagcacaaggccgatcgcgtatccgatcaccgcgccgacgatcaccatgtacagggtctcgtaggtcgcgtcccagacctccggccagatcatcgacacattcggcagccatgtctccagcagatcattcattgtcgttctcctccacctcgttcacatgcaggtcggcgagcggcgtcgcgctcaccccgaccgtcgggaaatacgcgagcgccttgctgaccgcctcggccggaccatccagactgaccaggatcatgccgaccggcgtgccgtgaatcacgtccacgttgccgaacatgatgttgcctctcacgccgaaccgttcgcgtatgtcggccatcagcgtctcctccgcaccggagccgaccgagaacagcagatacacgctgccgctctcccgctccttgctgaacagcgggtgctcctggacgagcgtgatgcccttgttcatgttgccggacgtgtagatgaactcgcgggtcagttcgttggacgggtggtcgaacacgtcgaggatggacccgtcgtcgacgaccttgccgtggctcatgaccgccaggtcggtgcagatgtccttgacgacctgcatctggtgggtgatgagcacgatggtcaggccgagccgtgcattgaggtccttgagcagggcgaggatcgaccgggtggtgcgcgggtcgagcgcactggtcgcctcgtcgcacagcagcacctccgggtcgccgatcagcgcacgcgcgatggcgacgcgctgctgctggccaccggaaagctgccgcggatacgccttggccttgtcggcgataccgacgagttccagcagatgcatggccttcgcgcgggcgtccttgcgggataccttctcgtggatgagcggcagggtgacattgtcaagcacggttctggatggcatcaggttgaagtgctggaagatcatcgcaatcttgcggcgcagcggtagcagccggccctcgccgagcgtgctgatggtggttccgttgaaggtcacggtgccgctggtcggacgctgcaggacgttcatcgtgcgcaccagcgtcgattttccggcgccggagaaaccgatgatgccgtatatggagcccttgttgatggtcagggacacgtcgtcgacggcgcggaagcggtttttgccgcggccgaattcgacggtgacgtggtcaagcgagatcagaggggcgccggcggcgacggaatccgaagcctccgccgctgcggctgcggttgcgttgacggttgcatcgctcacgcggcctcacccgcccgacccgcagcaccatccgccccatcgacggcggacttgccggacgccgcgagcacggcgtcgaggatctccttctcgccggacagcacgaagtcctccatcaccgggctgaacggcagcggcgtgaaccgcgcgccgacgcgcagcaccggcccgcgcagataatcgaaatggttctcggccacgcgcgccgcgatctcgccgcccacgccgccgatcttgatggcctcgtgcgcgatgaccagatgaccggtcttcttcaccgacgcgtagatggtcggcatgtcgagcggcgtgatggaccgcaggtcgatgacctccacgctcacgccgtattcgcgccgggcaacatccgcggcagcgagcgccttggtgagcatcagaccgtaggagaccagcgtcacgtcggcaccttcgcgcacgacctccgcacggctcaggtcgatgggcggcaggtcctcgggcacgtcgcccttgaccgggaacagtcccttgttctcgaagtagatgaccgggttaggatccttgatggccgccttgagcagctgcttgccgttggccggcgtcgagggcacgaccacgcggatgccggggatgttggtgaaccacgtctccagcgactgggaatgctgggcggcaccgtgcttcatcaggccgtcgggcgcgcgcagcaccagcgacatggtggcctgtccgccgaacatgtagcgcgccttggccatctggttgagcacctcgtccatggcgatgccgatgaaatccgcgaaatgcaggtcgatgaccggcttggcgccggcgatggccgcgccgacgcctgcgccgacgagcgccgtctcggagatcggcgtgtcaagcacgcgctcggggaattcgtccttcatgccggcgaactggccgaagatgccgccctgcttggcgatgtcctcgccgtagacgaacacacgttcgtcggctcgcatctcttcgagcatggcctcgcgagtcgcctcgccgaatgtgatgattcgctcactcatacaggttcacctcaccgctgaatacgtcgtccaaggcgtcctcggccttggggaatggactgtttaccgcaaattccagagcctgtgcgaactcctggtcgagccgctcctccgcggcgtcgaggtcgtcctgtgtgacgacgccttcgagcaggatcttacgccggaaccggtcaatcgggtcgttgtagagtttccactcctcgacctcctcctgggaacggtacttctgcgggtcggtgatgaagtggccgtcgcgccggtaggtcttgcattccaggatggaggggccgtcgccgcggcgggcgcggtcgatgagcttggcggaggtgtctcgcacggattcgacgtcgttgccgtcgatggtgacaccggggatgccgtatccctgagcgcgttccgacaggtagtccacgttcttgatgtcgtcgaagcgggtggtggatgcccacgcgttgttctcgcacacgtagatgaccggcagtttccagctggcggcgaggttcacggcctcgtggaaggtgcctcggctagatgcgccgtcgccgaagaagcacacggccacgtcgctgccgtgccgctgcttgatggcgagcgccgcgccggtggcgatgttgaagccgccgccgaccacgccgttcgcgcccagcatgccgacgctgaagtctgcgagatgcatggagccgcccttgcccttgcagtatccggtggcgcggccgtagagctcggcgagcgaacggtcgacgcgggcgcctttggcgagggtgtggccgtggccgcggtgggtgctggtcacgtaatcgtggtgggtgaggttgctgcatacgccggtggcgacggcctcctcgccgatgtacaggtgggcgggcccgacgatatccttgccgatgtgcgccttgacggtttcctcgaaccggcggatcttgcgcatggtggtgtagaggtcaacggcctgctgcgtggtcaatggtgtgctcatgatgtgcgggctttcgtatgttccttggtttgtttcctgttggatgtgggcggcgcgtgggcccgtcccgacttgtgccgggccttgcgcgggaatcgtcgcggcatggccgtctcctgcatggtccgtctgacgacctgtgcggccgtccttcacggatgccatgccgggccatatggccgacctgccatgatgccggccggagggccgccgcggcgcggaccgtccccttggtccgcgccatcccgtccggctggcatcatgtcttctcggcgagcactccccttcggccgagatgcgtcgacgttccccgttcgcgtcgcttgtcgtgtgtgttgttatgttgcgtgctgcggttgcggcggcattcgccgcatgtcaccacagcggaatgacggcccccttgtacagcttgtcgatcagtttcttgacgtcgtcgctgcggtaggcgtccacgatcttcttgtaggtggcgttgtccttatccttggcgcgggagacgatgatgttgtagtacggcttggactgctcgttgaccggctcgatgtagatggcgtccgacttggggttgagtcccgcgtcgagggccatgaacacgttgatgacgctggctccgacgtcgggcagcgaacgggcggtctgcgaggcttccagctcggtgatcttcaggttcttcgggttggacacgatgtcgtccggcgtggggttcgtgccttccttgtagtcgagcttgatcaggccggcggactggagcagcagcaggccgcgggccgcgttgacggagtcgttggcgatggtgacttcggagccttccggaatgtcttcgaccttcttggccttgtcggagtacaggctgatcgggttgagcaccgtctcgccgactgcggcgagcgcgttgtcgtgcgtcttgttgaagtcgtccatgaggatgtagccctggtaggcgttgaggtcgatgtctcccttggcgagcgcctcgttcggctggatgtagtcggagaacttcaccagttcgacgttgatgccctccttcttcaggttcgggatgacgacctgatcccagacctcgttgctgtcgccgaccacgccgaccttgacggtggtgccggagtctgccgagctgctgttcccgcacgccgtcagaccgccgacaagcgatgtgaccgccaataccgccgcagcgattctcctgatcttcatgtctcttcgttccccctggtatcgtgtttggtttgtgccgtgtgtttggatgctaagattgctgatcgtgcacattgatcttgtgcgcccgctgcgttccggcgggatgccggccgttttcgcgaacaatgttcagcgtaatgcgcgttttcacgcggttcttgcgattgcgtcgaacagggctatcgccgaaatctatatgccgctatcatgcgcgtatgccgcacggccggcgaatgcgcgcccgggcggcgcggaggccaccaccagtctcacatattgagacataaagccgtcatctcgtcggattcgccggcaaaatccgcgccgtaaccgaatcgcctcgaatggaccggccccggagacggtggcataatacacgcggaaaacatcagtcacggcgaaaccgtgcaagggagggaacatgatcatcaccaccgcatccggcgcatcaacggcgtccggcagtcctgtcaatggcattctgctggcgatccacgcgggagccggcgaccggagcaaggatggcagagcgcagaagactgcgcaggccgagcgcgatctgcgtcgggcgctggacgccggctacgcgctgctcgaacagggcgcgcccgccgaggatgcggtatgcgccgcgattcatgtgatggaggatgcgccggagttcaacgccggtcggggcgcggcgctgaccagcgagggaaaagtgtcgatggacgcctgcctgatgaccggcgacggcgaggtcggctccgccgccggactgaccacggcccggcatccgatcgatgtggcccgggcggtcaaggagcgcgccaagcacacgatgttcgcgctgccgggcgaggacctgctgcgctcgtggggcatcgaattgcgcgatccgtcgtatttcgtgaccgaggaacgccggcgttcgctggcacgcgcccaatccgagggcgacgcctgggagaagcacggcacgatcggcgcggtggcgagggatgccgccggacatgtggcggcggggacgtccacgggcggcatcacgaaccagatgccggggcgcgtcggggattcgccgctgcccggatgcggcacgtacgcggccgatgacagcgtcgccgtgtcatgcacgggtatcggcgaggcgttcgtgaggtctgtcgcggcgcatcaaatcgcggatcgtgtgcggttcgccggccagtcagtgcaggaggccgctcaggccgcactggatgacgtggcggcccggcgcggcgacggcggcgtcatcgtcatgccggccagcggcgacggcgtcatcgcctacaacagcgagacgatgaactacggatacgtcaccgccgacggcgtccgcgtcgttcacggcgccgaataacaacagacggcctgcgccatccgacgacagctttccgtccatcccgagaaagtcccatttgcggcgtgcgatatggaactttcgcgggatagggcaccggacgatatcgagctacaccgcggatgacgaccgtccgatggacccttttgcggggtcagcctacgatggcgtcgacggcgtcgatgacggctccgcggaagccgtccttctccagcttggcgacgccgcggatcgtggtgccgccgggcgagcagacggcatccttcatcgctccgggatgggtcccggtggccatgtacagcgctcccacgccctcgaccatcttcgcggcgagccggtatgcggtggcccgctgcagtccgtactgcacgccggcgtcacccagcgcctcaatgtacatgtcggtgaaggcgggtgcgcagccggccaccaccatggcgatggtcatgtgtgcggtgtcgacgcgctcgatcagcgaaatcgggccgaacagcgattcgaagacctccgtctgcatgtcggtgagcgtgttgtcggtctcggtgacgagcacgcccttgccgacggccatcggcgtgttcggaatcgtgcactggatatggatgctctgagccagatcgccgaacagcttctgatacttcgccagatcccagccggcggcgatcgacaccacgaaccgtccgttcttggcgaactcgtctgcgatgggcttgatgacggattcgatctgatacggcttgatggcgatgatcaccacgtcggccgcggcggcgacctcacgcgcgttgtgcagtggacgcgccccgagcttcgcagtgctggcttccagcttgtcgtaatgcgccgcgcaggcgacgatgtcgccgccgttgacgacgcccgcgtcgacgagaccctgcgcgatggcctgcgccatgttgccatagccgatgaatcctatggtgatgttctgcgccatgatgctccttgttgtgttgttcatacgaaagatgcagttcgtcatgccccgccgcgcacggccgcgaagcgtacgcccgcacgctagaacagcgattccagaccaccgcggttgagggcctcgtcgtagagatggcggaacacgagatcgccgtgcagcccgtcatgctcgaactcgttggtgacccagtaatgcgagttgccgacacggctcagcgtgtcgagctgcatgccggaatccacgtacatgtcgtcgaaatacacggccgattgcagcggaacctcgttgcgggccagctggtcggcgtcatagatcacaccgaatctcgtatcctccatcagcaggtccatcgccggcttgaacggccgcagcgcggactcctgctcgaacatccacgggaacatcgcctcgccggtgaaggccagcgggcgttcgccggtcgagaaccggggcatggtgtcgcgcacgcgctgtgccgcccagcgaatcggctcgtccagttcaccgttcgcgtagatgaactcctgcagcggccagtacaggggacgcgaggaggtcgcgttcatgaccttcgccaagaactcgtcggacaacgccgccccggctgagaccgaaccatcgccgtcgacgaacgcatcgtcgaaaatccagtgcacgcgctcgaagcttggcttcatgccgaagtcggagccgaggcattgcaggcgctccacggtcagcgggtcgccgttcggcagcagcggggttccctcgggcagcgagccggaatcgccaccgatgccgccggcttccgcgatctcagccacggtcggcagctgatccgcgacggcggcgacacgatcggcatcgacgccgtagcgctcgtaaaactgcgcggtcttgcgggccatgcgcgggaacgtgtgctcatagacctcggtcgcgttcgccgggacatgcgggatgccgccgcaggtgaagctcgcggccactccttcggggaacagcgacaggtaggtcagcgtcaggaatccgccatagctctggccaagcgtcacccacggcgagccgccgaactcggtgcggcgcagatgttcgaagtcccgcacgatcgaatccgcgaggaaccgcttgaggtaatccgcttgcgcacgcgctcccccggcggcgagcctcgccatggcatgcgagtcgacgcgcgaagagcggcccgtgccgcgctgatccggcagcaccacacggaaatgcttgaccgcctccgcaatccatccgtcgctcgacgggttcagcagcctgggtccggcccctcccggaccaccctgcaggaacaccagcagaggcagatcgtcatgcacgtgctcgggggcggtcaccacgcggtagaacaggctgatcgattccccgtcaaagccgcgccccggctcatgaccgacccaatcaagcgggaccttgaccgaccgatcctcgatatgcagccccggcacgtaatattcggcaagcagcgtcatccattccctttcattgatgcaccccggcatcccacgatgccgtaccattctcggtaccactgtagccgaccggcggcggaaacccgaggggattcccaccaacgaaacgcaccccgcccgacacgccgtatcgcaatgaatcatccggccgaccgatgtgggtcgggtcaccgcacgcgatacgctgaaccgtatgggaatcatggaacgaatcaccacgtggaacaggaagcatgcgctgctcgcagatgccctgtatgcggtgatcatctccatctttttcacgctcatggccggtaccaatgacagcaatcccggcatcatcgcctatttcgaccatacggtaatggccttctggagcttcgttctgatggttcccgtcgcgatgcgccggtggaagccgcagatggctacattgctgttcgccggtctggtggtcgtccaactggcgttcgggccgtcgatggtatatgccgacctgatggcgccatggatgctgtattcagccatcgtatatgcggatccgcgcaattcgaaggcgttcatcgtactcgccgtcgccatcggggccttggcgtcgcccgtcatcatctggtccgccgatgcgggtcccatcctcaatcagggcgtgcccttcgatggactcagccccctggagacatgttcggggacatacatctatggtctgagcggtgattgcgccaccaccatagcgacaagctcagtggccatattcatcttcatcgccgtgtatctgttcgcggcgatcatcgtcgcgtactggcagcgggcccggcgcatcaccgtcagcatgatgcatgagcgcaacgacgccttgcaggcaaaagaggatgaggaacgccatatcgcggcgctcgccgaacgcgcccgcatcgcgcgtgacatgcatgacgtggtggcgcacacactgtcgatcatcatcatccaatccgacgggggccggtacgcgggcgccaacaatccggcgctggcccggcagaccatggagacgatccgtcatgaatcggagcgcgcgctgcacgacatgaaacgtctgctgggcgtgttcggagggtcggaccatgccgattacgcggatgtggacgcgctgatcgaccaggcgagggcggcggccggcatggggtgcacgattcgcaagaccgtgtccggccagccgcgggccgccgcgctcggcgcacaggcgagcaccgcaatgtaccgcatggtgcaggaggcgctgacgaacgtgcgcaaatacggcggcccgaacgtcaccgtgcagatcagcgagatctggggggctgacggacttcacgtcaccgttgccgacaatggccgcggcgcgtcatcgtcgttggacggccacaagcccggttacggactgatcggcatgcgcgagcgaatcggcgcggtcggcggcagcgtgaccagtggaccgcagcttggcggcggcttcgtggtgtccggcttcgtgccgtacagcactgtctcaacgcagtccgaggctgctgcgccggcgtccgaaagcccgaacgtagcgtcttccgctgcggtgtcttcgggcgcggcaatcatgccgatggcggccccgacgaccggaacggtttcaatggcgacggataccgggaataccggggtcgtcagtaatgtcgcgaacgccccgcaatccgccgtcgccagtcaagtcggtgtcgtccaaccggccggtgtcacgcaaccggccggcgcaaagatgccccgtccggtgtcgcagatgtcatcggtcccgacacaagcgccgccggcgcccatcaccatacgcctgcgcacgattctgtccgccctgcgttcgaagccgatccagcaggcatccgctaccggggagcagcggctcaactggatcgagcgcatgtcgcagtggaccgagcggcattatctgctgaccgacctgctgctcaccatactggtggcctggatgctgctttccatcaatccatccgtcatatacgccgagggactgcagctcgacaaccgtttcgaccgcgcattgacgatcatcatcctgattccgttgatcttccgccgcaggttcccggaatccagcgcgctggcggtggccatcctcgctgcgcttcagctgctgttcttcgagccggtcagtctggccgatatcctcgcttcccttgtggccctgtattccgcggtgttgtacggccgtgacaaggcatggcgatggacggggatcgccgcaatatcggattccgtgctgttcggatgcaagatcttcgccgctcaaaccgggtatcggagcatcttcagcatgctgactcattcccgcccggcatattccctcgcggcgacgcccgccgcgttcgcatcggcaatcatgttcatggtgatatcgctggcgttgtgcataagcgcgacggccatggcacaatgggaccgatccagtggatcgaacgcgctggtgctgcaagcccgcgaggaggcgttgcgcgcggagcaggccaagcagcgcatcctggcggcgaacatggaacgtgaccgcatcagcgagagcatccagtccgaggtgacgatgacgctgaccagcgtgatcgaccaggcggtcgccggcctgcgcatacttgacgattgcgagcgtcacggcgaacagccgtcgcccggggccatctccgaggcgttcgcggccatcggatcacagggccgtgcggcgctggcccacatgcgcaagctgctgggcgtgctgcgcgagaccggattcagcgatgaggctcaccggcaagagcagcccggcatgcagctcaggcccgcggcatcgctcgacaagcagctgcacgatagccagctgcacggcatcgcgtcgtaatgagacggcgctccacggcccgccggggatcatccgacatgaattcagggttaaatcagggggcgtgatgcgggacttgttcgccgatgttggatacagtggaaggcatgagtgagttgcaaagaattcgggtggtcatcgccgacgatcaggaactggtgcgagcgggattcgcaatggtgatcggatcccagccggacatacaggtggtcgggcaggcgggcgatggcgcccaggcggtgtcgttggccgaatcgctgcaccccgatgtggtgctgatggacgtgcgcatgcccggcatggacggactggaagcgaccagccgcatcagtgcgctggaagcggccgccggagacgcaccgcgcaagacccgcgtgatcatcctgacgacgttcgacctggacgagtacgtgatggcggctatcaacgccggcgcatccggattcctgctcaaggacaccgagccggagacgctgctgagttctattcgcacggtatatcagggcaacgcgattattgcgccttcggcgacgaaacgactcatcgaaaagatgatggaggacgggtacaccaagcatgggttgacggcgactgacggctatgcggacggttcgtccacgatgcccggcgcccggccggtggcatacactgacccggaactgaacctgctgaccgagcgggagcgtgaggtgctggtggagatcgcccatggattgtcgaatcaggaaatcgccgacaagctgttcatcagcctgccaaccgcgaaaacgcacgtggcgcatatccttgccaaaatcaatgcgcgcgaccgcgtccaggccgtcgtcttcgcctacgacaacggtctggtataaggcgaatataaaaaacgcccccgctggcgggggcgcgatgctcagtccgccagcgggggcgctagttgtcagatcgcgtgcttgcggcggatcatcatgatcgtgacgccggcggcggcgatcaggatgaacgccgaggcgatgccggacacgtccgcgccggtcttcgacagcggctgcgtgccggaggggttgcggccagcggcattgttgacaccgatgttgccggcattgctaccgccgttaccgttgccgccgttgttgccgttgttgccactcgtctcgcgcacgaccgaggcctgcgcctggccgggctcgaccttgacgacgttcttgccgtcggcgctcagcgtgaccttggcactgtaggccgcggcgaggttgactcgcgcccagccctgcgacgaggcgtccagcggatagccggagtcaccttcggtcgcggcgagcacggccttcttctgcgcggaatccagcgacttgaacgcggcgacgttgtcgagcatgcggacggccgagtcaggcaccaccggcgcctgtccggtcgtgcccgtggcctggaagccataggtcatgcgggccttgtacgcggccagtgcggaggcacggtcggtcaccggcttggtcgaaacctcgtcggtgaaatcgttgcggtagccgttggcggcgttcgcgccggtgttcgtgatgcagacgtcgagcgtatcgccgtggttgtcggccttgcactgcgcggtcaggtaatcgacgagctcggcgcgggcggccgcgccttcctgtgcggtcttctcgtcgctcaccgcggtggcgacgccgtactggccggcgatgtggccgcccatgatgtcaagcgggtagtgcacgccgagcacgatgcggttgttgccggcctcggacacgcgggtcatgatctccgggccaagctcgggcagcaggtacgccaggccggcgccctgcgtgaacgcgaaggtggtgtggccggacgggaacgagccggagttgtacagtccgtcatactcgttgtcgggcgcttcgccgtctccccagtcgaagttctcgtaaccggggaccttcttgatgttcagcgtctgcttcagaccgttcatgttcagcgtcgtgccgttgaagttcacgcggtccacgtaggggcgcgggtgctggtatgtggccttggcgacgccggtggaagcggacttgttcatgtcagacaggaactgggcggtcttcggcaacttaccagcgtcggcggcgtccttgtagtacttgccgagcaccggaccgagcgcgtcgtacagcgtgttggtggagttcatctgggcgtcggacagggcgcgctggtcctgcgcggtgttgccgtcggtgccgtacgccttgttgttgatgtcttcggtgagctggtcgtcgtgcacgagcaccgacttgccctcatcggtcacgcccttgcctgcgacgtagtactcgttgaagtcggtcagcagtccggtgatcgtgtccttggaggatgcggtcttcaccacggtcggcgccttggcgccgaaggagatggcggtgatggtgctgccgtcttcgctcagcgtcaccttggcgctgaaagccttggcgaggttgatgcgctcgaatccgttggagctggcgtccagcgggtagccggagtcaatttcggaggcttcgagcacctgacgacgctgggcgtcggtcaggtcggggaatgcggtgagcagcaggttctccgcgccttgcggcacgacgggcgcctgaccggcggccgaggtctgcgagaatccgtaggtcatgcgtgcggtgtaggcgtcgatggcggacgcgcggtcggtcaccggttcggtggacaccgcgtcggtgaaggtgttcttgtatccgttcttgtcgttggcgccggtcttgctcacacacgcggcgacggtgtcgccgttgccgtcggccttgcagcgtgcggcgatgtagttctcaagttcgtcatgggccggcagcagcacgttctggcggaacgtggcatcagaccacagagcggtgacggatgcgctggcggagatgcgtccgccgatcacgtccatcgggtagtgcacgccgagcacgacgcggttgttgccgccttcggcggcgcgggccacgagttccggtccgagctcgggcagcagcgtggccaatcccagaccgcggttgtaggtcttggtggtgtggccggacgggaaggactgcgacggctcctgatagtcggtgtaatcctcgccgtattcctggccgtcgatattgatcatcgggatgcgcttgatgtcgagcgtcgagctcagaccgttgaggtcggtgtcaccgccgatcgtgcggtcgacgccttcgttctccttgttgaagtacggacgcgggtagttgaagtccttcttggcgctgccggcgccgacgaagcccgcgaacgagtccttgctgcttttgctgaacaccaggtcggaggtcttgggcagctcgccctgcgcgacgccctcggccacgtactggccgatgatcggcccgaacgcgtccttgtagatgcgcagtgcgtcgccgtcgctcgcgtcgagagcggcgcgctcggcctgcgtgtaggtgccgtcgaccttggtggtgtcggcggcggccttgttgttgatggccacgacggtcttgtcgttctgtccgagcacgctcttgccggcatcggtgacctttccgcggaaggcatcgccctgcggcgtgttgttcacgaccttcttcggggtccaccagttgtaatactcgccgagcagcgaggtgatgttcggcttgaccgcgctgccgtacgagggagtgtccgcggcgttcgcggtgacgctcacggacatcagcatcgcgatggatgcgatgcctgccacggcgcccttgaggaccgcggacttacgcattgtcttgtgcattctttcagcttccattgtgtgttggttgatatggaaccgattctgttgtagaccaactgtcaggttccgaccgctgaaagataatgaaaatcaccttcgattaatgaacagttcattttgcaacgtaccgatttttcgcgtgttcaggttataacatcgcgcgtcgggagccgcgtgtcacgggtcgtgcggtataacgccgtataggcgatgaggtcccttcttttgagtgaaagaagggacctcattgcactggcggctgtgttgaccacccaccggctctacgaactaggcttcagccagagcctcgacaggctgaaccgtcaaacagacagtccagtggactgtctgtaggtgaagtgagcggcttgccgcgaaggccgcctaagaggctcaggcttcagccagagcctcgacaggctgaaccgtcaaacagacagtccagtggactgtctgtaggtgaagtgagcggcttgccgcgaaggccgcctaagaggctcaggcttcagccagagcctcgacaggcggcgtcttgactgcgcgacgggccgggaacacgctggcgagcagggctgcgatggcggccaccacaagcacgatgccgttcatgccccattcgaaggggaacacagtcttgccgtacaggctgaacaccatgtatgaccccagccatccgaacagcgtgccgagcaccacgccgaccacacctgcgacgagcgacagcagcagcgcctcgacggccagtgagcgccgcagctgcccgcgggtcatgccgatggcccgcaatgtcgcggattcgcgggtgcgttcaatcaccgacagactcagcgtgttcgccacgccgatcagcgcgatgagcaccgcgacggcgatcagcgcgaccagaagcatcagcatcgagttgatgatggtctcccattgtgcgcgttgcgccacgggaccggtgatggacacggtggagtcatacgaaaatacgtcctgaatcttgttgaacacgtcactcagggagacgccggccgactgggtatccacacgcatgagcagcatgtggctggtcgcggtgacgtcgccgttgttgaaatggctggtgttgatgaaggcgacggcatcatagttggacgagacgcggcggtaatcggattgcaccggcttgagacgcattgatgaggaaacgcctccgttcgtcgagcttgcgctggcggacccgtcttgttcggtgcttgccgcaatgccattcgattccgcagcagtgaaccgcagcttcgcatcggagccgaatgtgatctccttgcctgaggtggcgcggtatttcggcagcagcacggtgtcgtcgccgacggtgacgccgctcaggtcggcgtgcatgacgccggcgagttcggaggtgttcttgacgccgacgagcagcagggacatcgttcccccgttcacgccttccgcggtcaccgtcgccgtgggcgcgtacatggtggccgcgacgcccttgacctgggccgcttccttgactgcgctggtcttcaggccgtcgccggtggcgatcatgtcgacactgtaccgggacgcgagcgcctcccccatggtctgcttggcgctggctgcaccggttgcgatggtggcgaccagggtcacgccgatcagcagcgcggtgccggtggcggcgacgcgacgcgggttcttctggatgttggcgtgggcaactttggcgctcggaccgcacatcgagacgagcgcgccgacgccgcgcatcagcaccggcagccagaacgtggcggtgagtacgagcccgaggaacaccagcgcggccccgccgatggacatcagcagcacactgctgtaattgtcgctggccatggtgtccagaccgttcagcatgccggacagctgccatacggcgacgccagccagtaccaatccggcgatgatcgtcagaacgccaatcgtggcgcggacctttccggcgcgtgatgtatcggtcagctcgatcgggcgcagggcctcaagcggcgtcacgctggtggcggaccgtgcggagccgagtgaggcgagtacagtcatgatcaggccgaatgcgatcggaaccacgaacgcttgccacgagagaatcagcctggcctgcattcccatcatttccattacgcccgtgttcgtgaccagcgcgatcagaccgacgccgaagccgacgcccagcaccgacgcaatcaggccaagcaatccggcctccatcagtacggatgtgtacagctggcccttcttcgcgccgattgtgcgcagcaacgccagcgtgcgcctgcgttgcgccaccagcacctggaacgtgttggcgatgaccagggcggcaacgaacagtgcgagcacaccgaagctcagcaggaatatggtggggaagctggtgttgttcgagctgaggtccctgacggcctccgcctcgaccgatcggcgcgattccacgccataggatttcggcaggagcccggagacctcgtcgacggtccgctgcgcggcagcggcgtcggcgtcgtcgatgtcaagcaggagcatgtacgcctgcatatggtcgaaatcatccacgccgtataccgcagcgacgacgttctccgacagcaccgaagcgccaccgtaaaacgagtacacaccaaacgggtcgctggtcaggccaacgacgcgcacgtcacgcaccgcggtgccgctcagagcgctgccgttggatatcggagcgacgtccaccttgtcgccgacacccactccaagttgtttggcgacggattttggcaacgccacctcgttgttgtcgaccggctggtcgccggagacgatgcggaccggcagcagcttgcggtcggttgacgtgccgacggcgtatccgttcgagcgcttgcccgctgcggagatcgaaacgctgacggacgtgtcgacgcgggcgcccttcacgcctttcgtggcgcgtatccggtcgaggttgaaatcggcgacggtggttctgtcggccgagccgttttcggagaccgcgccgttgctgtttgttttcatcgtggcgatgtagttcgcttcgccgagctgggcggtcctctgcctgcgcagcgagtcgtccatggagttggagaacaggaacgtggcggcgatgaacgccgtgccgataaggatggctatgcctgcggggatgagcatcctcgcgctttttttcatgagtttgatggtgatggagaacatgagaagtccttaatgctgtgggcgggtcagcggcggtgctgggcgacggcggcgtgctgcggagcgccccgcgccccggaacgcttggagcacccggaacgaaagacgccttttcggtgtgccccttgagggccgccaccggcggtcttggaacggtggtgcccgcggacggcccgccgaccagttgggtggcccgctcgcgctcgttcatcaacagttggttcatgctctcggcggtcgggcgatgctcgtcggcgacgatctggccgtcggcgaacacgatcgcacgatcggcataggatgcggcgacggcgtcatgggtgaccatgatgacggtctgtccaagttccttgacggatcgcttcaggaagctcagcacttcggcgctggagacggaatcgaggttgccggtgggctcgtcggcgaacaccagcgacggtttggtgatgagcgcacgcgcgatggcgacgcgttgctgctggccgccagacagttcattcggccggtgcgtgagacgttccttgagtcccagcgtcgtcgtcagcatgtcgaaccactgacggtcgggcttctgacccgccagagtcaacggcatgaggatgttctgctcggcggtgaacatcggcagcaggttgaagctctggaagatgaagccgatcttgtggcggcgcagcatggtcagctgattgtcgttcatggtggtgatgtcggcgccgtcgaacacgatatgaccgctcgtggccgagtcgagtccggcgagcgtgtgcatgagcgtggacttgccggagccggacgggcccatgatcgcggtgaacctcccttgctcgaaccgcacattgacgccgcgcagcgcatgcaccgcgttttcgccatgcccgtagtccttgaccaggtcgatcgcctcgatggcgatggggcgccgctgttcctgcgccgcaccggcattggtctgcggctgcatgatctgctgttccataacgtcctcttccatatcaatacagggattttccctgaacgttactttcaccatacggatggcgggctcggaccggcatcgtgcggcggggtgaatcgccatcgtgcccatcatccttgagtattacgcgctcgaacattgtgcgcggtttcactgcgctcggcggcctctctcggccgggaacgcacgggcccgtggcgatgacggggggataggggggtgcttgacaagaagaattgtacgatgagcgagaacagtgttgagaacgagaatggcgaaacgtccattttccaatgattcttagatttgtcctcacgccccgaaacggcatgtaaccggttaaaaacgatttcgtggcacagggaatgccacgaaatgccgaaaacagcgatttttaccgtttcgtggcacgaaaccccctgcttgcatcactgttcaagacaaaaatgccaaaatgtggtcagaacggagctgaacagcaggatcggaccatacgccctcccgctggcgggaggtggcgcgaagcgccggcgggtggttgtgcggcgacatccccccccccgcttcactacagcccgccagcaagggctatatgcaacaaacccgcgctgcatgacgtcagcgcgggtttgtacgggttccccttctcgttccgtgtcacggttccccgaccggcgacgcggaaaaaccttgcggctatctagccaagaccatcacttggccagtccggaggcgcgcagcgcctcgaagccgcccttgaggtcgtcgaggatgtcctcgatgttctcggtgccgatggacaggcggatggtgccctggtggatgccctgatcctccagctcctccagcgtctcctgggagtgcgtggtggaggccgggtggatgaccagcgacttcacgtcggccacgttcgccagcagagagaacaggtgcaggttgtcgatgaagacacgcgccgcgtccttgccgcccttgatgtcgaaggtgaagatggagccggcaccgttcgggaagtacttcttgtacagctcgtggtcgcggcgcccctcgatggacgggtgcgagacggactcgacctcaggcacggtctgcaggtactcgacaaccttcagcgcgttctgcacgtggcgctcgacgcgcagcgacagggtctcggtgccctgcagcagcaggaacgcggcgaacggggacagggtggcaccggtgtcgcgcagcaggatggcgcggatgcgggtcacgaaggcggctccaccaagggcctcgtagaagttcagaccgtggtaggagggatccggctcggtcagggtcgggaacttgcccggcacctcagcccagttgaagttgccgccttccacgacgacaccacccagcgtggtgccgtggccgccgatgaacttggtcgcggactcgaccacgacgtcggcgccgtgctccagcgggcggaacaggtacggggtggcgaaggtgttgtcgacgatcaccggcagatgatgcttgtgggcgattgcggagatggcctcgaagtcgggcaggtcggcgttcggattgccgaaggtctcgaagtagacgagcttggtgttctcctggatggcgtcctcgaagttctgcggaacctccggatcgacgaaagtggtggtgatgccgtcgcgcggcagcgtgtgcttgagcaggttgaaggtgccgccgtagatgttcttggaggagacgatgtggtcaccggactgggtgatgttgcgcacggcgtactcgacggccgcggcgcccgaggcgaccgcgatgccggcggtgccgccttcaagggcggcgatgcgatcctcgaacacgccctgggtggagttggtcaggcggccgtagatgttacccgggtcggcgagtccgaagcgggcctcggcgtggtcgaagttgtggaagacgtagctggtggtcgcgtagatcggcactgcgcgggagtcggtggccgggtcggcctgctcctggccgacgtgcagctgcagggtttcaaaacggtacttcttgttggcttcggtcatggtggtcgctccttttcccatgtcgggatgctgtggtttccgtgtctttcttgtcgccacccgtcggcggtttccagcgtctggcgaggtgttggtttagaccatagggcacatggatgcggcatcgcaagtccggcgttatcgcggttgcctataaccctttaaaagccgttggcatcattggtgtcgcaggtcgtaacaggagccctaaaaccgactatccacgatgcgacacgccgctgccgtcagagccggttccacaggtcacggatcatgtcggtgatggtcaggtcgcgcagggataccatcttcgggaacgtgcggatcagacggcgctgctggcggttgagcgagcgacggaccagctcgccggcatccgcaaccggtctggctgccgcacgaatgccctgctgggctccggccgcgaaccggtcatacgcctgctccgcctgcccgcgcagtttggcggacgtttcgcgccactgctcgtcggcctcgctgatgcgtgtgtcgatctgtctgatctgctgcgatttgagcgccttgatgccctcgctgaccttcgccagacgcgagtcgagactgcgcagaccggcctgggtgatggccgcatcgattaccaccacgacgaacgacagtcccgcgacggcgtgaagcagccatatcggccaggaccggacgatgtcggacatccacggctggaccaccagtttgatgcacgtcgcccccgcgccgaacgccagaaacccgttgagatacacgcgcccgttgatgttgaacggcttgccggaataatcccagaaacgcatgtggtacagtttctcgatcgcccagctcgacgcatattccagcgtgcatgcgagcacgccgctggacaggaacagcgacagcggattgttcacgtcatgcagcagcacgacgaccagcagaccgccgaacccgtagatcgggcatatcggcccgttgagcatgccccgatcctcgaaccgcttgcgcagcacgacgctcaggccggtctcccacacccatcccgcgaacgagtatgccagccaatacaggaagaagcgttccacgacaatcagaacatccatgggcgtcatggcatcctccttgcgatcatgcggacggaaccgccgcatcgggcttcgtcccgtcgtcacgtgtatcagacaactctagcgcgaggcgtcacgttccggcttccgctcccatgccgtcgatacgatgcaggtggcacttcccggccgcccgccaccggtggtgcgctgggcgggaccgcgttacgcggtgtgcgcccgacgatgctagtctctgttgtgtatcgtcattgcctaccagtaaggggtgtttccgaatgaccgatgatgtgacgctgtatgaccgcgacccacattacattccgcgcgtggccgccgtgcacgacatgtgcgggtatggcaagtgctcgctgaccgcggcgatcccgatcctgtcggcggccggctgcgacgtgtgcccggtgccgacggccctgttctccgcacacaccaagtacgccgtgttcacgttccatgacacgacggacattctctccggatatctggatgcctggcgcaaggagaacgtcgagctggatggcgtgtacagcggcttcctcggctcccccgaccaggtgtccatcatccagcgcctgtaccgcgaatatccgtccgcgctgcggctggtcgacccggttatgggcgacgccgggcagatgtacccgacgtacacgccggaactgtgcgaggcgatgggggctctggcggacggcgcggacgtgctgatgccgaacctgaccgaagcgagcatcctgaccaagcgcgactaccccgggcaggatctcgatgacgccgccgtgaccgaactgctggacgcgctgctgggactcggtgccaagaacgtggtgctcaagggcatcgaccacggtgacggcaagatcatcaactacgtggcgagcgccgaaaagggcgctgccgagaaggtcgagcttgtgcacgacaagctgccgtacatgatccacggtacgggtgacgctttcgcgtccgcactgtgcggtgcggtgatggccggccgtggcctggccgaatcggctcggatcgcgggcgaattcgtacgtcatgcaatggaaagcacccgcaatcagccgcatttcgaggagcgcggggtcagtttcgagctcgatctcggtgagctcacttcgctggtgaagtgagaccgtgccgcaaagccggcaaaacggaactgcgccgaagccctggctgggacttcggtgcagttttgtatcagaaccactctgactcgggaccaaggaatccggcctgaggggaaggcgtcaggccactcccgtatcgcagctctcagtattcgcgcgtcttgggcgggaagtcattgatgtgcacggactgccacaggatggaggtgtgaggtgccgatgaagcctcggcatcggcggcatcggccatcccggtcatcgaatgtgcgaggaaacgttcgtcgtcacgcgccggataatcgagcctttgcagggaaccgcgcgattcgtggcgcgcctcggatgcgcgcagcatggcttcggcgagcagtgtcaggtgccgtacctcccagatcgcggttatctcctgattgaacgcgggcgtctccgaatgcgccgtgagacggctggcgcggggacggatcacagtatcgagcaggttcagggcctcgctgatggaacgggcgtcgcaacgcaccgccagcgcatgttccatcagcgttcccagatcggcggcgagccgatacgggttgtcctcctcggaaccgggctgcgcggaagcatctgagccgccgagctccgctgtctgcggcataccgtcagacgtatcgtctgccgcgtcatcgtccacgtccggtctgcccgcaagcatcgtggcgacatcctgcttgcgtgaacgggcgacgtcgtccaccagcgcggctgccgcctcggcgggaccgtcatccgcatcggcgtcgcgcatcgggtcgtcgaccggcgactgtgcgatgcgggccgccagcgactcacctgcgcgcgtgccgaacaggcatgcgtcgagcagcgagttgccgcccagacggttcgccccatgcaccgacacgcacgagcattcgcccgcggcgaacaagccctccacgaccgtgcgggtaccggaatcggcgtcaccgtcctggctccctgactccgcccagcgatacacctctccatccgtggtgatcgggatgccgcccatcgtgtaatgcgcggtcggtttgaccggcaccatgtccttggccggatcgaggttcgcgtacgccttgatggtctccaccacctgcggcagcaccgcattcatatgatccggatcgatgccggtcatatcgagccacacgcagtccttcggaccgtccgggtctttcgggtccgcgacgccgcgtccgccgtcgatctcggccatgatcgaacggctcaccacgtcacgcgcggcgaggtcgcgatgctccggcgcataacgttccatgaacgcctcgccgtcggcgttgcgcagcacgccgccctccgcacgggcggcctccgacaggagtatgcccgtgtgcgcgagacccgtcggatggaattggacgaattcgatgtcttccagctggagtccggcggacaacgccaaggccatgccgtcgccggtcagatcccatgaattcgacgtggtgtggaacagtcgtcctgcaccgccggtggcgaacatcacgttgtgcgcatgaattgcgtgggtgacgccggtgtgcgtgtcataggcgaccacgcccgcaacggcgctccccgacttgtcaagcaccacatcggtcacgtaccattcctcggcgaattcgatgccggccgcgacgcactgctgccacagcgagtgcaggatctgatggccgatgcggtccgccgcatatgccgccctgcgcacgggcatcttgccgaaatccgcggtgtggccaccgaaccgtcgctgcgcgatgtggccgtcatcggtgcgggagaacgccacgcccatacgctccaggttgatcacggtctgcggggcgtactcggcgagcagcttggccgcatcctgatcgaccagccagtcgccgcccttgacggtgtcatagtaatgccaatgccaatcgtcctgttccacattgcccagactcgccgcgatgccgccctccgctgaaccggtgtgcgagcgcaacggctgcagtttggatatcaccaggaccttcggctcgatgccggactccttcaactgttcgatgtcaggggagtgcatcagccccagcgccgccgacaggccggccgccccggcgccgacgatcaccgcgtcatacatttcttccacatgtttcggactcatatccaagattgtcgcacaagggctgacgttcgccgcgcacgtgacgggggcacggcggataataccgttcatggaagaaatatccgacagcacggcgacgcccggcaacacgacaacgtccggcaatgcggcaacatccaacggcacagcgtcgttcaatagtgcgacatcgttcaacagtgcggtgtatgacatcgtccggcggatcccgcgcggagcggtcgcgacctacggccaggtcgcgacgctggccggccgcccacgcaatgcgaggttcgtcggcttcgcgctgcacgccaatcccgaacccggcgtgattccctgccatcgcgtcgtgttccgtgacggttcgctggcgcccggcttcgcgttcggcggcccggagcggcagcgcgcgatgctcgaagaggagggtgtgccgttcatcccgccgcgggcgggccacgacaatgccggtgacggtggatggcgtgtcgacctggcacgatgccaatggcaggcgtaacgcacgccaaggcaccatgctttcgcctgtaccatccgccacgagtgagtatcgtcatcatgatctccgtctccctccggtttccggaacgatggagatgcgaccgttctcgacggttatcagtccgatgagctccatcgtccccaattgcgagagcacatgggcgaccaactcatgcatgccgcgttccggcaccgcatccgctccctttccttccgttgcgcccgtctccaggcctttttcacccgaccgggtgcgcagctgttcggcgacggattgcgcggtcggggctatccgccggcgacggcaccatcggatggcatcgatgatcgcccgctggctctcggtcatcgccgatgacctgttgccgcccgatgggctgctgtcgcgcaatatgccggcatcacgaggcgtcccgacatcgcagtccgagccgtctttccgttgagtggccacgtcgtgaaacgactccggcggatgcggggcatgccagacgtcatccatgtcggcgacggagcacacgatggtggcccgttgctcctgaatgagccggttgcagccgccgttgcccggcatgtcaatgttgccgggcaccgcatggatgtcccgctgcagttcgcttccccagttcacggtgttcagcgcccctgaacgcagtctcgcctgagtgaccaccagcgttgacgaaagcgcggctatgatgcggttgcgcgacaggaaccgcctcgcctccggaatggttcccgggcacagttcgctgaccagtgctcccccgttttccgcaatcccgtcgaacaactcgctgttgcactgcggaccggcatggttgaggcctccggcgaacacggccaccgtgcgcccggcccgtccgatgccgtacgcccgcatcgcgtccaatgctcccctatgggcggcggcgtccacccccatggctccccctgaaaccaccagatgcccggcttgcgcggcatgcacggctatgtccgtcgtcagtcggcgcccatactcgttgacgccgcgcgagcccacgatgccgacgggctgcgggcaactggtcaatgccgcgcgatcgccactgccccacaggcacagcgggggcgcgcaacgacccagcaacgccaggtcgttgagacgggtgggccaccatacgtcatgcggcgcgatgatccattgcctcccctccatggtgaaccagccgcagagataatccctgtcccacgtggggagagttcgcaatcgctgctgccatgtcgccaacgcggagcgaaacgaacgcaccgcctgcggcgtgggcttgctcccccatcgggtcatgccgatgcagaacgcctgctcgatgaccttccccgcgccggccgacgtgcgcagttccgggtcgctgtcccggatgagggtgagcgcttcccacgcatcggccgtgcccttgaggagcgcggtcatcagcgcgtctgcggtattgaggcagaaagtcaggatagcccgagcgagcgtctcctcgtcaaggtcccagcaaaggccgctatccgactcgcatacagtcatgacatcctcgctctcaacatgatgccttgcgacatctcgtccggccccggcgacgttttgcccgccagatcggccagcgtccatgccagtcgcatggcccgatccactccacgcaggctcagccgatgcgacgccagcgccctgttggcgagttccagcgccttcaccgacgtgttggcgcgcatccacgaccccggcacttcggcgttgcagccccacccgtatttggaataccgttcgccggccgccgcccgcgccgcgatcacctgctgctgcatgacgtggctgccaatcgaatcacgggtcggcgccgaggctatgcacgggaccggcggcacctccacctgaatatcgatccggtcgagaatcggaccggatagtctggcgaaataccggatacggtccttctccttgcacacgcagcgctccccgttgccgtaggcgtaaccgcacgggcacgggttggctgccatgaccatctggaacatcgccggatagtaggtcgtccccttcgtgcgagacagggccacgtacccggattccatcggctcgcgcagcgtctgcagcgtcctcgcggagaattcaggggcctcgtccatgaacaggatcccgcggtgggcgcgcgtaatcgcccccggcatcgcaagccctgatccgccacccaccagcgacgcggtcgacgccgtatggtgaggcgcctcgaagggcggcatatcggagatgccataatgctgcagcgtgccgcacagggagcgtatcgacgccacttcgagctgttcctccggcgtaagcgggcacatgatgctcggcatcctggaggccaacatcgtcttgcccgagcccggcgggccggtcatcagcagatggtgtttcccggccgccgccacctgcaacgcccacttgacatgatcctggccgaccacctcgctcatgtcacccaatccgctgaaggccggcgtgtcctcgaccgtgcacgagaccgtcgcccggtcgacgccaagcgtatacgacgctcggcctcccgccagctcgatgagctcgcccacatgacggacgcaggtcacgtccatctgcggcaccaggcgggactcgtcctcgttgccgtaaggcacgatcagtcgccgtatcccccgctccttggcatgcagcatgatcggcagcagaccatggatcggcagcacggtgccgtcgaggttcacctcccccagaacgatcgtctcctccaggctgtcgtgcggaatcgcccccgccgcgctcagcacgccggccgcgatggcgaggtcgtgcgaggcgccccgcttgggcatcgacgcgggagacatgttgacggtgacgcgggtgtccggccatttgaacccgctcgcctgacaggcggatttgacccgttcccgcgattcgctgagcgaggcgtccggcaggccgatgacgctgaaatacggcagaccgggcgagatgaacgcctgaatctggatgatgaaggccttgagaccaatcaggccgaccgaaagggaaccgccgatagccatcagaacgcccccggtatgtggtgcaccgacaccatgcccgcacgcgcgacgatggtgagcacgtcgaaccgcacccccgtatgcctgatgcggtggttcggctcgagcagccactgcacgccggcgcgtctgagattcgtctgcttgtgcagggtgacggcctcctgcggcgtgccgaaatggtcggtccgtctggtcttgacctcgacgaacgcgatgacgcggtcgggcgtcatcatgacgatgtcgagctccccgtaccgcgaatgccagttgcgccccagaatcgtgtatccgtgccgttccagccaatccgccgcatattgctcccccagcacccccagctgcttgggtttgagcgagccgtcgcacagccggcacagcatatcgctcagccccgccacgggaggatcatgatcggtcgtagcgcctgcgtgttccgctcggcttgtcaaacaggtgtccatgaccatcagtgcaccataaaaccgccttcgaccacatggttttcggccaatgtggtcgaaggcttgcccttcggcgtgttgtggatggaatgtggacgaatatccacttatccacatcgtcggcacgacgacgattccgtgcgcggaaccgaggcatgggcgcgcccgccaaggccatgccttatggcaaactggttgacgattctttgacttcaggaggcatatatatgagcggctcaagtgacgcgctggccacggtgaccttgcgggtgaacaggttcacgccgcgtcccgagcgtgatcgcccggcccgctccggcagccccttcgccaagaaaagctcgccattcggcggcgcctccgcttcggcgcgtcggcgtccccgcggcaagcagtgggttcaggagtacactctgccggttcgccgggaggatacggtgctggactgtctgctgaagatcaagcgcaccgtggatccgaccctggcgttccgttattcgtgcgggcatggcatgtgcggttccgacgcggtggcgatcaacggcacgccgacgctcctgtgcaccgcgaccgtcggcgactgggcgaaaccggcgacgccgattcccctcgccgatggcgagggattccgccgcaccggcgacgcgggtgataagcggagcgcggacacgaccgctcccgaaggaaactcttgcgaagacaacgcaggcgcgcaatcccacgaactcggcatcatcgaactggcaccgctgccgggattccccgttcagcgcgatctgatcgcggacatcgacccgatgctcgaccagatcaggaagctcaagccgtatctgcaggccgatggcgtgctcgcgaccaccagcgaaggcaaggtggacgtgttcgaataccttcagcggccagagcagctggcgaaatacgagctgctcagcaactgcatcgcctgtggcgtgtgcgagggagcctgcccggtctacgccggcggcgacgccttcattgggccggcggccctgatctcggcctcccgcttcgtgaacgattcgagggacaccgcaaccgacgagcgactggacgccatcgacaccgccgacggcgtggccgcttgccaatccgtgcgcgcctgctcgcgccactgtccccgcggcatcgacgtcggcgaggagatgtggcagatcgtcgcccgcgtccgagagcgctgacagaccgaaacagacaccattcgacaacggttcaggggattgtttatggataagacctcatatgcgaatctcgccagggcatgggagtacgtcgagaatcatgcctattcccggcagacgcaagcgctgctggacgcgcgcgaacaggccgcccagtgcggtcttgcgcagggttccgcagctcaggcgcagctgctgcatacgctggcatgcatgatgcgcagcacctcggtgatcaccatcggctccggctcactcgtggagatcgtccagcttgtcgatgcgctgcacggtaccggccagttgacggcggtggattcctcgacgcagggaatcgcgctcatccgcaagatgttcttcgccctgtccgacacgacacaaacgacgctgcgcgcggtgaacgcgccggtgaacgtgtttctgccgcgtctcaacggcacggattacgacctgatcgtcgtctccggcgatgcggcgaactatttggacacgtttgcccaggcgccgcggctgctccgggagcacggcgtcatcgtgttcaccgacatgctcgcgttcgagggcgacgaggcgaacggcggtgtacccaatcccgccgaccgcagcgacaaggcggtggtcatgcggcaattgctggacatggttcaggacgacgaccgtttcgaatcctctctgactccgaccggcaccggactgctcatcgccgtcaagcgctaggaggcgatccggctgaccgccacttccacggcctcgtcggggtcgtccgtgatcagtaccagactcgggtcgagcggcgagatcataccgtgatcctgcacggtcgacgtcagccattcgaacaggccgcgccagtattcggtgccgtacaggacgatcggcatcgacatgaccttgtgcgtctgcaccagggtcagcagctcgaacatctcatcgaatgtgccgaatcctccggggcatacgatcacgccggacgagtatttgacgaacatggtcttgcgcacgaagaaatagcggaagctcatgcccaggttcacccattggttgagcccctgctcgtgcggtagttcgatgcccagtccgaccgatttgccgccggcaagcgccgcaccacggttcgcggcctccatgatgcccggacctcccccggtgatgacggccacgccatgctttgcgattccacgccccatgcgccgcgccgccttatagtccgggtcggtgcgcggcgtgcgggcggagccgaacacgctgaccgccggcccgagctcggcgagcgccccgaacccgtcgacgaactcggattggatgcgcagcacacgccacggatccatgtggagccaatcggtctcctgattgggtttgagcaggttggccgtagtgttgtcgttcggaatcatcgggccgcgcagaatcaccgggccccggtgataggtgtcgcccaacggcgatgcatcctgctgaacgccggagacggcggcgcgtaccgccgcgtcacccgtctgccgcccggcggccgatgatttccctcgttcggcacctgccgcggcgatgatgtcgttcagcgcgttgttcgccgccgcgtgggcgagcttctgcgcggccagtttgcgcagcttctttttcttgccgcttttcttcgacgcatccgttttcgacatgatcacgcactccttgtcttggatgtctccaacataccagcagaagctccgttacgacgccgactccagctcctccttctcgaaccgcttggactgacggctcaggaggatgccgctgatgagcgccgcgatcagggatgccatcagcacgccgaaccgtccttccgcagacagctccgtgttcgtgtaggccagagaggcgatcaggaacgataccgtgaagccgatgccgcacgcgcaggctgcggggaacatgtcgcgcacgcgcagtcccttcgccatcgtcagcccagccacgtgcgtggacagccatgccgtgatcatgatgccgagcggcttgccgatcaccaacgccacgatgatgccgatgaccacgggcgacagcatcagcgccggggacagctcggcgaagtgcacgccggtggcgaacagcgcgaatatcggcagtgcgagcagcgaagagaacggctgcagcttgctcgcatagcgttgcgcgcgcggcgacttctcaccgtgcatttcacgcgacggcgtcagcaggccgaccagcacgcccgccagcgtggggtgcacgccggcctcgaacatcatcacccatgccagtacgcctatcacggcgaccagcagccatgggacgcggcgcaatctcaccaggaacgcccagatggccgcgcatatggcgatgccgatgaaccagtaccatgcgttgagcgacgagaagaacaccgcgatcaggatgatcgccagcaggtcatcgaccgtggcgagcgtcatcaggaacactcggatcgaaccgggcatcgccttggcgaacaacgcaagcaccgccagcgagaaggcgatgtccgttgctgtgggaatcgcccacccctgcgccgcttcggcgaacgggacatccgcgccggtcgggatggtgacgattcccggcgcaggcggcgcgaaccgggagaacagggagatgaccgtgatgaacagcaccggcggcatcagcataccgcccacggcgcacagcatgggcacggcggcggctttcggattggcgagcgaaccggtggtcagctcctgtttgagatccaatccgaccgtgaggaagaatatcgtcagcagaccatcctgcgcccaatgcccgatcggcaggatgatgttggtgccgggaatgcccagctgcgtctccgccaccgcctcgaacatgtgcgacgtccatggcagattagccagaaccagaccagcaaacgcgaacgcgagcataatcaggccggaaatacgatcggacgcggcgattcgccggatcctggcccaaaccctacccgtgctattcatgaaccctcaattccataccaggtgaacagcctgacgcggacgtatgcctgacatgtcaggattcggtgccatcagaccgactcctcattttacagacccccatcccactctacgccccgggctgagcctaacgaagcgagaccacaatcacaggggccaaaggcgagccgtgaagaaacagcagagctgcttgtaggcgaggagcggggaaagggaggcgacggacaatccaatccggcggaagtcccatttattcgtcgccggatgggactttcgcggggaaggcgtgaggatgattccctgccgaccgccatccggctatcgcctgtaccacaccatgcgatttttgacggttttggggctggtgtggccaagggcgattccgggcccattcaccggtcattgaaaaatggcggtttccgcgacccgtgctttgccacaccacgtgatgtgaaggctcacatcgcatggtgtggctctctgctgtgccacaccatgcgattctggggtgtttttcgcctggtgtggcacacgggatgggagcgaatcagccggacggatggatagggactgagtatggactgtcccgccagactgagaaccacccccagtcatgccgcgcatgccagccctccgccagcggggacgataatgtcgggcgccccgctgtttgcctcacgactcgccccgccggcgggccgagaggcaatcccggttgccgaaatcaggcgcgctgtgacagggccacggcgatgttgtccagcacctgcttaagcagcgccttcgggcaggcgaggttgacgcgctcgaatccagctccgttctcgccgaacagcacgccctcgtcgaaatacactcgagcgcggtcgcgcatgaaatcgcgcagctcgtccgccgaaccgaagccaagaccgcggcagtccagccatgccagatacgtgccttccggctcgatgagccgaagtccaggcgtgcgttccgcgaactcgcgcagcagcgaaaggttgtcggcgagcacgcccatgagcgcatccagccacggttcggcccgctcatatgccgcttggcacgcgacgagtccgaaatggctgacggtcaggccggcgatgttctccgccgccacgtcgaacgcccgcttgagttcagggttgacggtgatgacgttggagcacagcagaccggcgatgttgaaggtcttggtcggggcggtgaactcatagcagcggccggcgtagcgctcccccagcgtgccgaacatcgtcacgtcgtgtccggggtaggcgaagtccgcatggatctcatcggccagaatggtcacgccgtgggcgatgcagatgtcgcccagacgacgcagctcgtcggcgctccacacgcggccgaccgggttgtgcgggttgcacagcatcagcgccgtgcaccgcggatcggacgccttggcctccagatcgtcgaaatccatgacgtaacgtccgtcgtcacccaggacgaggcggttgtcgagtatggtcaggccgttgtgctccgcggcggcggtgaaaggatagtagacgggtccttgcaggatcaccttgtcgccgggatgggtgaccgcacgcagtgcggtgttgaccgcgggcatgaccccgtccgacaggctcacccaggccgggtcgatgtcccagttgtgccgacgactcatccatgccgtcagcgcgcggaaatacccgtcggtcgcgtaatcgtatccgaagatgtcatgttgggcggctttgaccagcgcttctacgatttccggagccggcttgaattccatgtcggcaacggacatggcgatcacgtcctcgcttcccacacccatgtcatcctcgatcatgtgccatttgatggatgtggtgccgcgccgttcgaccacggactggaaatcgtacacgtctgctcctcgtatgtattcgatggcgccggaacacggtcgtgggcggatgctcctcgttgcgcctgtctgctgtgcgcccatccattggaaaagccctcggaagcattcgctttcaagggctttttgtgcgccgaacaggattcgaacctgcgacctgctgatccgtagtcagctgctctaatccgctgggctaccggcgcataccgcgcatattgaattatgcacaaccgtgaattgcttcacggctcgtgcgccagacaggattcgaacctgcgacctgctgatccgtagtcagctgctctaatccgctgggctactggcgcatgttgtcttgtttgcggcaactcaaataaattacatcaatgtaatgactttagcaacttggcgtgtcgcgcgcgtgtcgcgaacgtgccgcgcgcgtccccgtcatgccacgaggcgccgttccccacggaccagtttgggcagaccctcacccctgaccgaggccgcgtcgacgatcacctgctgcacgtcatccatgcctggaagctcgaacatcgtctcctcaagggtcttctcgatgatcgaccgcagccctcgcgcacccgtcccacgcgttatggcagtcgacgcgatggcgttcaccgcctgctccgtgaaggccagatccaccccgtcgacggcgaacatcttgcgatactgcttgaccagggcgttcttgggctcggtgaggatgcgcgccagatcggcctcggtcagctcgtcgagcacgctgaccacgggcagacgcccgatgaactcgggcagcagaccgaattcggcgaggtcgtcggcgctgacctgttcgagcagttcctcgggcttgacctcatggtcatgccaggaggccccgaagccgctctcgtggcgtccgagcctaccggcgacgatatcgctcagccccacgaacgcaccgccgcagatgaacaggatgccgcgcgtgtcgatggtcaccgtgtcctggtcgcggtgcttgcgtgtgccctcgaccggcaccgaggcgatcgtgccttcgagtatcttcagcagcgcctgctgcacgccctcgccggagacgtcacgggtgatagacgtgttctcgccggattttctggcgatcttgtcgatctcgtcgatgtagatgatgccgtgctgagccctctcgacgtccccgtcggcggccgagatgagccgctgcagcacggtctccacgtcatctcccacatacccggcctcggtgagcgtcgtggcgtcggtgatgacgaacggcacgttcatgaccttggcgagggactgcgcgagatacgtcttgccgacgccggtagggccgagcagcagtatgttggatttggcgacctcgacgtcggcgagcggatccgtgcggcggcgacgcccgagcgcctgcttcttgccgtcgagctgcccggccgattcgtgcagttccatgttgacgcgcttgtaatggttgtagacggcgaccgacagcgtgcgtttcgccgcgctctgcccgatgacgtaccggtcgagataggcgctgatctcggcgggcttgggcagtgtcagggcgttgacatcggcgctgtgctggcgttcctccgagacgatgtcgacgcacagctcgatgcattcgtcgcagatggccgcgcttgggcctgcgaccagcttgcgtacctgatgctcggtcttgccgcagaacgtgcaccgaggcacgtcctcgttgtaactcaccacgcgccccatgcagctctccttcgactatgcgtcccgttatgcgcactgttacgaggatacccccggcctgacggcgacgggggtatccacttgtgaagattcatgaacctcacgaacggtgttcgagcacttcatccacgatgccgtaatccttggcttcctgggcggtcaggaacgtatcgacctcgatgtccttgcggatcttctcgacatcctgtccggtgtgcttggcgagcgtgttctccagccattcgcgcatgcgcagcatctccttggcctggatctcgatctccgtggccttgccgaagccttggtcgatggccggctggtggatgagcacgcgcgcgttcggcagcatcaggcgcttgcccttggcgccggcggccagcaggatcgccgcggcggaggcggcctgaccgaggcagacggtctgcacgtcgggcttgatgtactgcatcgtgtcgtagatggcggtcatggccgtcatcgagccgccgggcgagttgatgtacatcatcacgtcacggctcggatcctgcgattcgagcacaagcagctgggccatgatgtcgtcggcggacgtgtcgtcgacctgcacgcccatgaagatgatgcggtcctcgaacagcttggtgtacgggtcctgcgtcttcatgccgtacggcgtcttctcggagaactgcggaagcacgtaacggttctgcggcgagacggccgcgccgccgcgcagcgcgctctcgcgggctgctgcgggcatgaacccgacgacgccgcgcgggccggcgagacggtcggcgcgggctgcgaactgagcttcttcggatgccatttcgatcattctcccttcgtcatcgaatcgtgcgtggtgatgatcttgtccacgaacccgtactccagcgcctcggtggcggtgaaccagtggtcgtactcgttgtcgcggtagatctcctccaccgtgtggccggtctgttcggcggtcagctcgctcatggtcttcttcatatccatgatgagctcggcgttgatgcgcacgtcggtggtggtgccgccgatgccgccggacggctggtgcatcagcacgcgggcatgcgaggtcaggaaccgcttgcccttggtgccggagctcagcaggaactggcccatcgacgcgcacatgcccaggcctacggtcgccacgtcgggctggatgagctgcatggtgtcgtagatggccatgcctgcggtaatcgaaccgccgggcgagttgatatacagccagatgtccttcttcgggtcctccgcggccagcatgagcatctgtgcgcaaatgcggttggccatgtcatccttgacctcttcacccatccagatgatgcggtccttcaacagacgattgaaaatcggatccggcatcgacggcatgtcgccgtccgccatcaccggggatgatgtcagcaaatctgccaccttatctccttgactcacagtacgttgtgtctcacaatacgttacagcaattcactctacctgtccgaaccgacggcagcgccctgcaccgccctttttcggctacccgcatagcgggagggcggaatacttgctctattgaaaatcaattcgccgtccttccatgtcggtagtgcccgaggttttgcacactaccgtatctttcgcccaacacgatatcgattcaatcactatcgacagtaggagcgaagtcatcttcgcatacccccagagaaccgaagatggccactttttctgatcaaatgagaattaccacggtgatgaatcaacgcccaacactcaattcatcattgcaacatgcctgccaagagaccacatcatgagatgagagcacgatgctcttcaacaatgtatggataagtcctcatggctaatctgtagtcaatgtcctgaaatatcgaaccatgtttgctatttcaggacattttctaatgagagcagcaatcaacccaacctgtgcagcagcccggacgatacgaaggcggatgccgccacggccataccgaccggcacgaagaactcaatcggcgcctcggtgagttccatgaccaggcacatggccatgagcggagcctgctgggatgcggagagcagcgcggcggccccgatcagggcgcacgcggtgaccgaatctacggggaagacgaacagccagagcagtccgagcatcgtacccagcgtggatcccaaggcgatgccgggctgaagcacgccgcccgatgcgccggagcggatggtcatcagcgtgacgagcgccttggccacgaaggtgagcgccagcacgctcagcaacatccatagccggttcagttcaagcggagtcccggcgttgacgaccgagcccggagcgccgtccgagccggcgaggaacgtccatggcgaggccgctgcggacgcggccgattgcgccgcaccggaagtgtcggccgtttcggggatgaatgtgctgaagccgagctgcgccgcggcacgcccattgcccatgacctgcggcacgacgatagagaccagaccggtcaccaatccggcgatcggcatctgccacatcagcgaccgtccggtgggcttgtgcgattcggcccactgcgagcccttgcggaacagtgcgccgacgacgccgcacgccgttccgcacagcagcgcgaacagcatcaggctcggcgtgctgttcatctgcatcgcgccgatgtcgtagaacatgtgctcgcctttgatggcggtcgcgacgaacgccgcagtcgcagacatccccaatccgaatgcgaccttctccaacgtcacgtcgacgagcagtatctccaccgcgaagaacatgccggccagcggcgcgttgtacacgcctcccagaccggcaccggcggcgacggcgacgaccatgcggcgatcgagcacgccatgcgcgtcgccttcgccgtcaccgatatggaagatgtcgcagaaccgctgcgccagcatggcgcccagctcgcgcggcgcgacctcgcgcccgatggaggcgccggagccgacgatgaatatctgcagcaccacatgcacgatggtctgccagaacggcatgcggcccccgttcaccgccttcttgacggacggcaccttctcggtcttcgtgcgcagcaggtaccatatgacgccggcgacgcccagtcccaacgtgacggaggcgatgcggcggatcgccggcacggtgaacgcgccgggaatgaactcgctttcgatgaatccgagcatcacgtattcgacgccgtacagcagcagcgtcagcaggccggcgcatgcgccgatgatcgcgccgagcaccagcgtggccgcggtcagccagccgatgcgcttccaatcggtcttctccatgatgcacctcttcgatggcgagtggaacgtccgggaacgggagacccgcccatgtcagcctacccgcggcatcctacacccgctcctcaccgcgcatatcccaccgtatatacgatttgacccggaacctttgcggttccgggtcaaatcagtcattctgcatcacgggcacgccgcgatagcagcgatgccgcgcgatttacgctcactcggcgtcggcggtgttctcgtcgtccttcttggcgagctcgtcggcgacggcggccgcggcggaagcggcttcgacactctcggactcttcgtcctcagcggcctcgccgaggaaggagctcaggtcgagggtctcgccttcggacttgaaggtgacggcgcgcatgccggcgagcaggcccttggagcggccaacttcctgcacggcggagccgagctggccgttcttgacgatggcctggatgaacgcggacggatccatgccgtactgctgggcgatggaggcgaggaagttggtgacatcggcctgggagaccttgacgtccagcttctcggccagggcgtcgagcaccatctggtcggtgagctccttgacgacctgcttctcggcgtcggccttctgctcgtcggtggccttggacggatcagcggtcacgttcttgagctgctgctcaagcatgtcggccttgacgcccttcggcaccgggatctcggcgccttcctcaagcttggcgatgaaggcgtcgcgggcctcggtggcctgacggccttcggcgtcgcgctcggcggccttgcgcacgtcggccttgagctcatccagggtatcgaactcagaggcgtcctgggcgaagtcgtcgtcgagctccggcaactcctcggtcttcacggagttgaccttgaccttgacgagcgcctcttcgccttcgtgctcgccgccctgcagcttgctgttgaaggaggtctcctcaccggcggacaggccttcgagggcctcgtccagaccgtccagcatggtgccggagccgagctcgtagctcacgccttcctgggagtcgacggactcgccgtcgatctgggcgtcgaggtcgatgttcgcgaagtcgcccttggcagccggacggtcgacgccgaccagggtgccgaagcgctggcgcagggattcgaggcggttgttcacgtcctcatcggtgacctgggccttgggcacgtcgatctccaggccgtcgagttccggcagctcgatgtcgggacgacgctcgacggtcgcggtgaacttcagcttggtctcgtccttggcggattcgggcacttcctgcacgtcgatctccggctgggacatcggatggatcttcttctcctcaagcgccttggaatagagctccggcacgccgttgttgacggcctcgccagcgacggctgcgaagccgatgcgctggtcgatgatcttgccggggacgtggcccttgcggaagccggggatgttcacctgcttggcgatctccttgcgggcggcatccagatacgggttgaactcctccgggtcgacggtgatggtgagcttgaccttggtgggttcgagattcctaacgctgattttcacgcttgcgctcctgaaagtcgtttattctacttcatctgccggtaggcaacctctacatgataacgcgacttacggacgctgcgatgagattcacctgccagtcacgggcgccctgcgatttgaggaattccgcgacatcgcgcttgcgcggttcgtcggtccagcacaggttgcgcaggatctgcggcttgacgatgatttcggcgggggtgcgggtgtcgtcggcgatctgggagacgactttgcgcacgtcttgcagcagccgcatacgctgagggtgcctggtggcccagagcttcatcgagcgaggtgcgttcgcatgctcctcgtcggccacgggcgccggcatcaccggccattgcgacggcggcagctccagcgcgcgccgaatcgtctctcgccataccgagggcttgaccttgcgctgaatcggcgcgtaccgttcgaacatcttgtcctgctcgccgccggtgcgcatgcgcacgcgctcgttgagcgacctgatcatcctgaattcgcgggcgttgcggggctttcgcgacgcggcctcgactatcgaatcgtcggagagcagcagtccgggcgcgatgtcataggcgcgggcgagctcgtctcgcttctcccacagcgccttggccacggcgaggccctggtggtcctggctgacggtgttgatgtgcgatatgcgcagccagggcaccggatgctcccgtctgggtcccatgccggtctgcagcgcataccggaactcctcgtcggcccatccgtccttgccctgcaccttcagctcgcgctgcatcttccggcgcagctcaatcagcagttcgacgtccaatgcggcgtaattgcgccagtccctcggcagcggccgatatgaccagtcagcggcggaatgctctttggcgagcgtgacgcccagataatgctcggtgaccgcggcgagaccgaaccggtgcaaccccagcatcctcgcggcgatctcggtgtcgaacagggtctgcggcgtcaggccgatgtcggcgaatccgggcaggtcctgcaacgagtcgtgtaatatccacacggcatcgccgaccgcgtcgttgaacatgccccagtcggcaccggcgcgggtcagggcgacggggtcgagcagcactatgccggcgccttcgcgcttgaactgcaccagccagtcctcatggccgtaccggaatccggaggcgcgttccgcgtcggcggccaacggcccggccgccccggccagacggtcgcatacctcccgaaatccttcaagtgtgtcggtcacatccggaacaccacctcgcggctgcgtctgcagcctcggctcatcggtcaactgacggctcctcctcgcattcgctggcggactgcacgaatcgcgcccagcactgcacctggccgcccgcgtccaaaccgccatccatgctagcaaggggtgtccatgagacacgcatctcgcagccggcggttccttcctgagcgagtccgaacgacgtgttctgcgtgacggtgaccgtacccgacacgtcacctaaggaggcgtcatccacgaacgagcacatcccgtcccagtacatgctcggggcgaggccatcgttctcgtcggacggcaacggcagctgcgcgtaggcgacgcaacgccaatgggagtgccagtcctcgcgttcgcgctcgacgtacagcagcatgatccagcccgaggccatgtgggcgtcgccgaacgaacgggagtcgtcatccgcgacgcattccatttccacgccgatgccgtagtcggccagcgtcgagggcacgggaagctcacggtagcgcatgcccgtcacccgcggcatggaacgcaccgattccaccgccgaccagaccgcgtccggcacgccgaccgggcgttcaggcatgtcggcgtccgggtgccgcatcgttgcggagcccctcggaaacgcgaagatttcagccatatatacaggctacggtgtcgtcgaagattttacggtatttccacacgcaagattgtgtaggttttcgagtccgacaccgcagagaacggttccctatcagtacacgacgaatccgtgcgactggaattgctccgtcacgcgcttcttcaacgcggcggacgggcccttctgatgctcaagaggatacgggatgcgcagctcatgccacttcgggcgcccgagctggtggaatcccagcacgtcgatgtgttcgacggccccgtcgaagctctcgcagatcctggccacgttctcgatgttctcctccgagtcggtcagccccggcacgagcacgaaccgcacccagatcttcttgccggccttcgccagccgccgtccgaagtcgatggtgggctgcagcagccccccggtgaccttgtggtaggtctcctcgtcgcccgacttgacgtcgagcaggcacaggtcgatgtcgtcgatcatctcgtcggtgtagttggtgttgaggaagccggacgtgtcgaggcaggtgtgcacgcccatctccttggccgcgtggaacacgcgcgagacgaacgccggctgcatcatcgactcgccgccggagaacgtgatgccgccatgcgtggccttgaacaggtccttgtaccggtcaaccttcttgatcatggcgtcgaggtatacgggctgcccgtcgcgcatcttccatgtgtcggggttctggcagtactggcagcgcagggggcatccggacatgaagacggtcatgcgcgtgcccgggccatcgaccgacgtgttgatgtcccacgagtggacgaagccgatgtcgccgcttttgagcgcgtggatgcggtcgcgcctatcgaggccgatgggcgattcgaagccggaaagccctcccatcagggtctgcgaggcgtattccttcgacgctttgagcatatgcggccgtgtggtgcggaattgcgcgatatcagacatcatcgtcctccttgaaagtacttcctgtatttcatactacaaacgttttgcgcggcgtccgcccgctatggacttcatgtcgtgtgaggatcgtcacgcggattcccaagcgcgccgtcctgcccgaccatatgagaaggggacgaagccggtcggcctcgcccccttcatcgtccggtcgtcaccgtctgtcagtcggtgaccgaaccctggtggaaggtacgggagatcacgtcgagctgctgctccttggtgagcttgacgaagttcaccgcgtagccggagacgcgcacggtcaggtgcgggtacttctccgggtgctcgacggcgtcctcaagctgctccttgcgcaggacgttgatgttcgcgtggtacaggccgtggccgttgccggcgtccaggatgccgaccaggttgccgatgcgctcatcctcgtcgcggcccaggccgtcgggggtgatcgtgttggtcagcgagatgccgtccagcgcgtcgttgtagtcgatcttgccgaccgagaacatcgacggcagcatgccgtgcgagtccatgccgttctccgggttggcgcccggcgcgtacggcgtgcccttcttgtggcgggacgggaaggaaccggtgttcttgccgtactccacgttggaggtgatggtcaggatggactgcgtcgggacggcgccgcggtacacgggcaggcgcttgacctgacccatgacggtggagacgacccacttggcgatgtcgtcggcgcggtcgtcgtcgttgccgtagatcgggaagtcgccttcggtgcggtaaccgacgatcaggtcgtcatcggcgccctcgacgtactcgtactcgtggccttcaaggttcttcgcgtccttgttgtagatcgggtagaccttggcatacttgacggcggacagggagtcggcggcgatggacaggccggacatgccgcaaccgagggtgcggtacacctccttgtcgtgcagcgccatctcgatggactcgtaggcgtacttatcgtgcatgtagtggatgatgttcagagccttgacatacacttcagacagccagttcagggccttctcgtagttgttcttgaccttctcgtagtcgagcgtgccgtcggcctcgggagcgatgggctcgatgacgcccttgtcgatgacctgcatgccggtcatctcgtcacgaccgccgttgatcgcgtacagcagggccttggcggagttcacgcgggccgcgaagaactgcatctgcttgccgacgcgcatcggggacacgcagcaggcgatggccgcgtcgtcgccccagtggttgcggatctccttgtcggactcgtactggatggccgaggtgtcgatcgagatcttggcgcagaagcgcttgtagccttccggcagcttcgggtcccagaagattgtgatgttcggctcggggccgggtccgaggtgctccagcgtcagcgtgttgagcagacggaaggaggtcttggttaccatcggacggccgtcgtcgccgaagccggcgtcggaccaggtcgcccagtacgggtcgccggagaagatcgcgtcgtagtccttggtgcgcaggaagcgcacgatgcgcagcttcatgacgatgttgtcgatgatctcctgggcgtcggtctcggtgatcttgccggactgcaggtcacgctcgaagtagcagtcgaagaacgcagagttgcggccgaaggacatggcggcaccgtcctggctcttgacggaggcgaggtagcccatgtaggtccactgcacggcctcctgcgcggtctgcgccgggcgggtcaggtccaggccgtactcgttgccgaggttgatgagctgcttgagggccttgatctgctcgtcgtgctcctcgcggaagcggatccagtgctcgatctccggctcggtgaagtcgttgcggtacggcacggaatccttgtcgcgctgcttgaacttgatcagcgcggcgacaccgtacagggccacgcggcggtagtcgccgatgatgcggccgcggccgtaggcgtccggcagaccggtgaggatcttgttgtggcgggcgatcttgatgtccttggtgtagacgccgaagacgccgtcgttgtgggtcttgcggtacttggtgaagatcttcttgatctccgggtccggctccttgccggcctccttgatggcctgctcgaccatgcgccagccgccgttcggcatcatcgcacgcttgcaggggacgtcggtctgcaggccgacaacgacgttgtcgacctcgggggaatcgatgtaaccggccgggaaggcgtcgatgctggccgggatgtgggtgtcgacgtcgtagacgcgctgcttgcgctcgaccgccaggtagttgtcgtcgaggtacttccacaggtgcttggtcttgtcggtcgcgtcggccaggaaggactcgtcaccggtgtacggggtgtagttcttctggatgaagtcgcgaacgtcgatgtccttctgccagtcgccttcgacgaagccgtcccaggccttggcctgaagctcttcggcagtaagagcggtcgcatcaactgctgtcatattcactccttgtgtcgtgcaacgcatcttcacgttgttgtcaagaaatgattctactagccggtcgatgtgagctggctgagagacggcgtgacttatctcacattcacgccgtgtcgtcagtcgtcgcggtcgtcgaagccgtcgtcgcggccgtccgagagcgtgttctcgccccatttgcgccacttgcgattggcttccgcccacagcgcattgcgttccttgacgatcttccacgcctcaagggcatcctcgcgggccttgtacggccccatgcggtgggagctcggtgagagcatgcccaactcgggctgctcggtcttcgtgttgaaataccactgcttgtcggtcatggcgtcctccccgcacccatggtagcgcgccgcggcgcccggcaccgcgcctatgcggcggccgggcgagcgctcccctactcacggaacgcgttggtgacgggcagacgccggtcgcggccgaacgcgagcgcggtgaccttcggcccgagcggatactggcggcgcttccactccgcgcggtccaccagtcgcatcaccgtgtcgacggtcttctcgtcgaagccgtcggccagcaggtcggcgcgaccgtgcgcatgctcgatgtatgcggcgagcaccttgtcgagcagttcgtattcgggcagcgaatcggaatccttctgccccgggcgcagctcggcgctcggagccttctcgatgctgctgaccggaatcatcacgccgccgggcagcggcgttccggcatcgccgttctcattgccgacgatgcgcagcccgccgatgccgacgcctgcggcagcggcccggttgcgccagcgggacagttcccagacacgggtcttgagcaggtccttgattggcgcgtatccgccgacggcgtcgccgtagatggtcgaatagccgcacgccagctcggacttgttgcccgtggcgacggcgagcagaccgaggctgttggagtacgccatgacgatgacgccgcggatgcgggcctgcaggttctccgcggccacgccttcgagcttgagctggccctggtacacattgaacatgggctcgatcggctgcacgtcgtaatgtgcgccgatgttggccgccaggtcggcggcgtcgtccttggaaccgatggaggaatacatgctcggcatcgagatgccatgcacgttgtgtccgccgcaggcgtcggcggccatcgccgccaccagcgcggagtcgatgccgccggacaggcccaggcacacgccggagaaccggttcttcgccatgtagtccttcaggcccagcacgcaggcggtgtacacctcctcgtccgggtcgggaaggtccgcgatgtcgcccgtcgtctgatgctcggcgtccgtgtcgaggtcgaagagtcccagatgctccatgaacatcggggaacgttccagcagcgtgccgtcgcggtcgacaacgaagctgccgccgtcgaacaccaggtcatcctgaccgccgacctggttcacgtagatcatcggggcgccgacctcggccgcacgcctgaccgcgaggtcgtaacgcgtatgggtcttgccctcttcgtacggcgagccgttcatcgtcatcagcacgtcgatatgctcgtcgacgagccgggcgactggcccgccgtcctgccagatgtcctcgcagatcgccacgccgatgcgcacgccgtcgatgtcgagcacgacggtgcggtcgccggccgcgaagatgcggaactcgtcgaacacgccgtagttcggcaggaaatgcttgtcgtagccggcccagaccatgccgtcgtgcagcacgaccatgcggttgcgaggtttgtcggacgcgtggtcggtgccgaccgtgccgacggcgacatacaggtcgcccaatccgtcggcctccagctcggtcgccagccagttcgccttgtcccacgccgccttgcggaacgtgcggcgcaacgccagatcctcgatggggtatccggtcagcgtcatttccgggaagacgacgacgtgggcgccttcatgcgcggcgagatgcgcgtagtgcatgattttgtcggcgttgccgtcgaggtcgccgacgcaggtgtcgatctgggcaagggcaaaacgaagatgggtcatagtgtcctatagtacccagccgagatgacggacgacaggggcggcacatgccgtcacgcgggatgatccgccccaccgcccgtcagcgaagctcggcgagcacccgcagcgaggcgttgacatagaagtcaacggcgggcccgatcgcgccgtccacgccgacgaagtgcggactgtgccagtcggcgcaccccggttccccgttcgagccgatgaacgcgaacaccagacgggccccgcatcccgagaactccacgaaatcctcccccgccatgctgggatgtatcggcttgagcgccgcgtaggagggcacgtcggccgcgaccgcctcggacagctcctcgtcgccgaccagcggcacctggatgcagtcccagtccacgtcggccgcgatcccgtacgcttcggccgtgtgctcgacctccgccacgaaacgccggtggaccagccgttcgtcgtcctggtcgaagaagcgcacggtgccctggaatcccgcttcggcgggcacgacgttccacacgtgcccgccatgcacttcggtgatggacagcaccacggcgtggaacggcgagatgttgcggctcacgatggtctgcagggcgaggatcatcgaggcgagcgcctcgatggggccggtgcccttctgcgggtacccggcatgggtgccctgggcgtgcagcgtgaccttgaacttcacgcagccggccatcatcggctgagggccgatggcgatctgtccgggggcgtagttcgggttgttatgcgtgccgatgatggccttcacgtcatccgtcgcgccggattccacgaccgtgcgggcgcccaggcccacctcctcggccggctggaagacgatcttcacgctgcctgcgatgcggtcgcggtgatcggccagccagaacgccgcgcccaaaagcccggtcatgtgcaggtcatggccgcagccgtgcatcacgccggggttcagcgagctgaacggcaggccagtgtcctcggtgatcggcaggccgtcgatgtcggcgcgcagcgcgatgcgcggtcccggcacctctccctcgatgagcgcgacgacgccggtctccaacgtcgtgtcgagcacgtctatgccatgcccgcgcagcagacgggccagatacgcgctggtctcgacctccttgaagctgcgttcgggatgctgatgcagataatgccgtatgccgatcagctcgtccgtgaccccgacatgttcgaccatgatttacgttccttccccgcgagatgtcatgccatgttacctctgtagcttcaatatacgcttggcgatggcgttcgcgatgccctgcacgatctggaccagcacgatcatgatgatcacggccgtccaggtcaccgtctggtcgaatttctgataaccgtccagtcggtctggcaaccggcgatgtcgtatgcatgggaccagggactcatcgcgtctcctccttgtctgccgcggacggctgcggcgatggcgtcctcgtagcctatggggtccgccgccgtgccgaagccgatgacatcgctggaacgtgacagctcccccgagagagtcgcgcaccagcgcatcgtcgcccgagaactcgtaggtgatcgagccgatggccgaaccggataccgtgtcgatgaaccgcttggtcaccgcctgctggggtgccgcgaacacgttgcacacatctccgcgctccacgacccggccggcgctcatcacggcgaccacgatgagggcgatgacgatgttgcgcacggtatggttgacgcgcaccggctcattgtcgggagagcccgcctgctatgttgctgctgtcatgttcgttcccactctgattggttgacaacgcccaccatacggcagcgacggcggcaaatcggcggaaaatggcggatcggcctatatgtgttcgtataatagggcgtgcacggcggcagtcgcagggcgggtctgataacgcgttacgggatgccatccagcgctgttcatacactggggatgaccgaatttcgtatcgcggaggttgcgtacatggcatcggacgacatcatgacagcgggcgccggaggcgcgacggccaccgtgcgagccgacatcaaggcggcgttcttcgacatcgacggcacgctgacgagtttcgtgacgcatgtaatcccgcagtcctccatcgacgcgctgcacgagctgcaggatcgcggggtgaaggtgttcatctgctccggtcgggcgccgtcgcacatgaccgtcgtgctcgacatgatgccggtgcacttcgacggcatcatcgcgctgaacggacagtactgcttcgacgaccacgggctcctggagaaggagtcgctgctgcccgaggacatcgtcaccatcacccgctggcttgacgagcaccccgacgtggtggcgaactactgcgagaaggattacgtctacttcaaccagatcaccgacgcgatgcgggccacgtggcgccaactcggcaagaccgcaccgaccgtgaacatcgacgatccgcacgagagggcgctgaagtatgagacgttccagatcagcccatacatcagctttgaagatgaagcgaagctgtccggcatgtgtcgcaatgtcagaggcgtgcgctggcatccggacttcaccgacctgattcccgccgacggcggcaaacccgagggaatgaagcggttcatgcggcattacggctggacgcgcgagcagaccatcgcgttcggagacggcggcaacgacgccgacatgctcgccttcgccggcatcggcgtggcgatgggcaatgcgaccgaaccggcgaaggccgcggccgactacatcaccgatgacgtcgaccacgacggcatcatgaacgcgctcaagcacttcaacgtcctgtagctccctcccctcccgctggcgggaggtggcgcgcagcgccggagggtggtaacagacccggcacgcatacgaagagccctgacccgacgagggttcagggctcttccatgtgtatcggagtgtcggcttcgaattgccgccgcgcttacttcaccacttcgatggacatgatgccggcaggttcgagcggcgcgtcggaacggtcggtcggcacggcctcaagcttgtcgaccacggccttggactcgtcgtcggcgacctcgccgaagatcgtgtggtgtccgtcgagccacggggtcggcacggtggtgatgaagaactgggagccgttggtgccatgcgccttgccgtcgcggccgcgacgcaggccggcgttcgccatggccagcagatacggccggtcgaacgtgagttcggggacgatctcgtcgtcgaagtcgtagccggggccaccggtgccattgcccagcgggcagccgccctggatcatgaagtccttgatgatgcggtggaaggtcaggccgttatagaacggctcatgggacggttggccggtgaacgggtccgtccattccttctcgccggtcgccagaccgaggaagttcttcacggtcacgggcgtctgatcgtcgaacaggttgatggtgatgtcaccttcggaggtgcgcatgatgatggtagtcatggttccaagtgtctcatgggcttgagaccgggggagagccgttctgccgtcatgcttcgaggacgcgacggactcaggtgtggatcccgggccaccggtggctccggatcggatcacgccggccatggcacctttggctgcacctgagattccgttttcaaaaggggcgtcggggttgaaggggctgacaaggtacctaggcgcgccggcacctaccaaagcacccggcttctcggcatcagtcgtcggtttcagctttttcatgaactcttcatcttggcaataataagtatcatcgataagatcttcgactgtcacgccaagagctttggcaataaggaacacttgcctcaaattaattttcgtttcccctttaagcatcaaggtgatggtaggccgcgagactcctaaggcgtgggccaagtctttctgaatcttgccggtcaatcgcatatagcggcgaatgttgtaacgtgccacgtcttcaaaacgttgcgcctctattttcacctgctctgaagtttctgtgacttccatgggttaatcctttccaaatgaagataattatatcaaacaatgtttaatattgctaacctatttggcgtgtttgcatttgtggggcgaaaaaatatccacatggatgaacttatgccgccgaatgcttttcttcctgctgcccaaaaaacgttgcatcgcttgggggagattgtcgatatagggatatatggcattgatcgatcctgttggagatgtggtcggacctctgtggcaattactaatctttgtcccctcgactgcgaaagtggtatttccttggtggagtcttgggaaagcatagatatgtgctatgccagggaacttttggaaattgctgggcatcccgccgcgaggcaaattaaatatcggtcttcgcgtagggcggggcgttatatgtcaaatggttgcgcatattgtgatgcgttattcggaaacttctgtatagatgaggatattctggatggacaaagacccagtctgattgcttctgtgaaaagacctttgcaggaatgggccgtcatggtaactcaattccatctttgatttgaaagtttcctctccgctagtgctgaaaccgcattgttgagatgcggtttttttaatttcgacacgccgtaagttaagctaacttgaggttaaaaaaaccaacccatatactgaggttagaaattttaacttagctgaaatgaggttaacgatgtcgaacatgaagaggtggatggctgaggtgggtttgacccatcgtcagcttgccgtccagcttcatcagtcgccagccagcgtgactcagaaagtcaattcgcacacgcattggcagcgcagagactgtgccgaacttcgcgagcagtatggtctgtcgtctgatttcgttcaagatctcattccgtatgaaaccgcatttcccaatggcgcgcaggaggttcgatgatggctggtggaatttacgaacagcttgattggccggataaccggagcgattatgtcgaggtgtgcgacggatgccacaccgcgatctggtcgacccgctggaacgaggagacatcggacggcttcgacgctttcctcgccaggaacggctggcatgactacatcgaccagctcgatccccggactctgaacctttgcccggaatgcgcgctgcgcgcgctgcagcggggtgagatccggacgcttgccgattggcggatccgccccgtgcgctcctacacgcacgccgaccgggaggtctacgcccagctgtccgcccgcgaacgtgtggtggcgggcctgctgttgaccgaggggagggcgtcatgagcaacgaagtgtcatgcgacagtgtggcccgccgcgtcaacggcgaaaacccactggatgtccttgtcggcgtttccacgccgtatggcccgttgctcaccgacgactatggtcggcccatacgttttgccgagtacggagacggaccatgccgcttcggggatcgtcccatccaggtcatgaagccatatgagtggctcgccgaccgtgtctacgtatttgatgacgaggccgtcgcaccgttcaaagacgatgtggcccgcttcgtggttgaggcctgccgctgcttcgttggtggtgacggagaccatgatcgcagcgtggtgctgtgctgcgaaggagtcgcagaacaacttgatctttcgtccgacgccttcacgccgatggtcgggtctgacggcaatgccgtcagtttcagctaccagccgtgtgaccgccttcgctgcgtctgctcgaccaatccccaaaaaggccttggtgtgttccatgtatggactgagcgaggcgccacctaccaagcggttctgggaccatgcgcctatgagcgtcggcctgagaaagccttgaccctgccagacgaactctggtccaggaatgaatcctggatgcgcgatttcttcgagcaggagacttccgatttcctctgcctcggcgtggtttcgcgccggacgaatatcaggttcgttgagggaggtggtgcgaggggttgatttcatttggttttctctttctctgaatcgataaaggaggtgttggtctgatggcgattgacggtgtaggggtactggccatggattccggtgccggtggcatgagcgacgaagccggaagacttgttttctcccgcgacccgtcgggaacattcatcgacggtatggtcttcggaacttcaggaggcggtgagaacgccaatctcgaagtgctgtgtgcgttgccctacgagcttgtacgcccacatgctagtgcctctgtcctgggtccgctggtcggcgtagggaatgtgaagaggctgtccctgagcgttaaataccttgatggtgagatatccgtcgggcggtacgaccgtgtatccggctttctcgttgagcaggcgcgcgccctcgttggtggggatgctgagtatcagttcagcgccgtggtctgccgcccaggagtcgcagaacgccttgatctgcgatccgaagccttcgcgccgatgcttcctgacgaccgcgatcccttcgatgatggctgcatgctcggcgaaagcctctcgtatctgtgcggcatggaccccgctcgtcccggtgcggtatatgagcgtctcggctacgcaaagggctggctggatgagggccgcgcctatcagacggtcctgtccccatacgcctatgtacgtaggcctgatcgttccatcgtcgtgtctgacgactgctgggacgctttgatcgaagtctttgatgtccctgacgagcaggctcttgattgcctttgcctcgccatccgttgcggcggcgcgtggcccgtcgacggcgagggaggtggtgcgatggtctgatcccattcgtttttctctctttctctgcaactaaaagaaaaaacgcccgttcccgatgctggaacgtcggggacgggcggtgcaaccaatattccgagcggccgcggatcccgtatcttgccggatcccggtccgtggccgcccaatgcattgtcttggagtagtgatcacacatgaacgaccttactaaagccttccgcatgtcttgctctgtgtctcccgagtgtaaacgggatttacacgcgccggtttggacgttcccgatcgtggtggcattcgcccgccacaacggtccgggctccgtcgattcccgtcgcctggcgtcgatgatggcgcacccgtccatggaagggagactcgcgtgaactggctcgcaatcgcattgatcgtgttcgtcgcgttctcctggctgatgacgctggccctgtgccggacggcacgtctcggcgacgagatgcacgccagattggccgacgagcgacgtgccgcccagcagcgtgaggaggggcgaccgtgagcaacatcgcactgtcatgggccttcaaatgccatgtcggcaacgccagcgcgaaggccgtgctcgtctacctcgcggaccgcgcggacgacgacggcaccgcagcctatccaaagatcgcgaccatcgtcaacgtcaccgaactctcggaacgcaccgtgcgcaccgctttgaagacgctccaggagcgcggcttcatccgccgcggcgaccaacggtacgcgcgcctcggcaaaggcggacggaaccgcctgccccagtactgccagatcgtgtgggacctcgcggtggagaccgacccgtcgaccctcaagtggatcggggagacgcacaccgcggaacgggatcccgcgaccatgggcaagaccgtggacccggaggccggaaccgtgttcgagaacggcgaatccgaggacgtgctgccggaaaacgttggaaccaagccgattcccagcactgcaaatctcgcagggctggaaaaagggccggaaccggcactgcaaatcccgcagggccagcactgcgagagctgcacccccagcactgcaaatgccgcacccccagcactgcaaatctcgcagagctgtatatataaggataaaaccctccaggtaaaccctcctagtaaaccctccttcccctctgcccctacggggcatctccccgcaagcggggcgaccgccgccgaaaaagaacaactcgacgaggacgacaccgagatcgccgaagcggccggacgggtcctcgcctcgctcggcgagcagcgctcgatgctcggcctggccacgccctcaccgaccaaagccgaccgcaaggccatcatcggcctgtaccgcaggctcgtcgaccagggagcgcaatggcccaccctcgtgatggtcgacgcgatcggcttcgccatgaacggcgattggtggcccaaacgcatccgcaccggccgggccctcgccagacactgggacgaactcaacgacgacatgatcctcgccgccggccgcacagacggcgacgcacacgcgcagacggttccggcggccgtgtcggaaccggatgctgcgccatggctgcccggctgggccgtggagacgctggccgaattggacggacaggacgcgacggccggaggggaggcgacggcatgaccacgcgcatcgactgttccgaggcgggcttcgacgaattcctcctcgccaacccgcagctcgacgggcacgcggacctgatctggcagctgcacgccgtctactggcgcaacaagcgccttggccatcccaaggccgtcggcctgctgatccaatacgcccgggcatgggccgcccgcaatcccggcgaaaccgccataggacgcctccaggcccgcaagacgccgatgacgcaaggacggcggccatgaacgggcgggacatgatgccggcctgcgcgagaatcgccgcggtcgacccggccatggcggatcgcatgtggaacacgacgaccgacgacgatggccgggacctggtcgacgaacggatgcgcggcaagggccgcgtgctgtgtgccgcgtgccccatgcgcctcgactgcatcagccgcgctctcgtcaacggttggaaggacaaggccgtgtacggcgggctcgactatgcgagccgctggaccctcgcccgactgatcgcccgtgacctccacatcgccgacggcggcctgcatcggatcccacagagtcgggtccgtgactggctggccgaccacccggactgggccgaacgcatgcgccgtgatggccgcgactactggcgacggaccaaacgccgccaacgctcgcgccgcgaatacacgcacgacgatccgctgttcctcccgaccgaacccgtgccgaagggcctggtccaaggcagcctcttctgaccgcttcccgtcgcgatccgcgtgggacgcggcacaaaccgcaataccgaaaaaccaactaaccggaatgccgaaaaaccggataccgacataccgagataaggagaaaccgatgaacgacaagaagaaccgcgagccgatggtgatcgcgttggcgacgggcaagggcggcagcatgaagaccaccagcgccgtgttcctggcctgcgccctcgtggaccagtcccggggcgagcagcgcgcgctcgtcgccgacgcggacgtgcagggcgacgcgaaggactggtggtacagggccgccgagctggacgacccgctgccgttcgacgtgatgtccgccgcgccggccgacatcgcgcacctgcacgggatcaacggccgtctcgacgaccccgtcgactgggtgctgatcgactccgccccgtacggccgcgcgttggacgaatcggtgaacaacgccgacctcgtggtcatcccgtcgagccccagccgcatcgacctcgaccaggccgtcggggtgaaggacctgtgcgaccggcgcggcgtccccgccgcgattctcctgtgccgcaccgaggccaacacgaccgccctgcgcgacgccctggcgtggatcgacgacgcgggcatcgcgtgcttcgagacgctgatcccgaagcgccaggacatcctcaacgcgaaatccactcgcccccgcgggtcccgcctgcacgagtaccgcgacctggccgccgaactcaagcggaccatgcgacagctcaaggacaaggaggaggacctgtgaggaacatgaacctgacgccccgcccgcgcgacctgaccgcgctgctcaccggcggccggccggcaccggcggataccggaagaccggaatcggtggataccgagataccgaaaaaccggagggccgtgaaaccgaacgacgcggagggctgggtgaagaccagcgtgagccttcgcgcctcgacccgacgccggctcaaggcctgggccgccgagcatgacatgcgcatccaggaagtggtcgatgccgccctcgaaacgtacctgggcttgaaataagctgtgaacctatggacaaggagaacaaatgacagagaaagaaaaggccatcgaagacgagaccatcgaacttccgaccgggcccgcggaaaagaagaagccgcatcgcggaaggatcgtcgtcatcaccgtcgccgcactcgcgctgcttgcggcgggaggcatcgcctggaggacgcacgaggaccgcctcatggccgaggccagggcggactgcgcggccgagagcgaacgtctccgcgtcgcgacgaccgcgtacgacgcgctattgaacggcaaggccgccagcatggcgaagaccgacgtgaaaagcgtgaaggacgcgaagacccttgacgtcctgtccaaggccatgaaggcgcccacgccgaagaccgtgtcctgcaaagcggattcgaggcccggcgtgcaggatgccacgaagggcgtcaccgcgaacgcatcatggtacaaggcccacacgaagtccctgaacgggctggtgaacgcggtcgaaacgtccaaactcgacaagaccgtggacgacgcgaacacgctgtacaaggagacggacggcagggtggcggacgacaagacccgcgcaagtctgctggacgccatcagaaaacgcgacgcggacgccatcgcgaaggccgtgaaggaggtcaacgaatcgaaggcggcgaaggagaaggccgatgcggaggcgaaggccagggccgaacaggaggccgcggcggccgccgcgcagaaggcgcaggcgcggcagtcatggccctcgtccggttcaggccacaccggctacaccggcaacggttattccggcgacacgtccacaccgagtggcggctcgcccggctcctcgtcatcgggcggatcggcatggaccgaccccaacgccggagcagcggacggattcgactgggattatgtcggaccctccgtgtgtgagcccggcaaattctgccctctcgcctagattctccttaactttcctctttcagggccccgcggcatccgtcgcggggcccttcccaccccggcggatgtccaaaccgacgccccccggacggtggttccatggtgtgcgtgcaccgggcgggcccgccccacggcggaccgggggaacacgcgttccccacgtcccgccccggcggcaccgccggggcgacccgcaagacaggaatccctgaaaggagagggaacattggtttccgaaaagaacgacaagagcgacgacctcaagggctacaacgccacctgggtccaaaaaaatgtacgacaagttcgccaatcagattgccgtgaccggacaacagtatccaaccggcgtccaggtcgtgtgcgtcgcagtcaacaacaaccagccgccgcacgactatgacctgaccgtcaccaccaaccacaggcagaggaccgacctgaaggtcggatccacggatccgattggcgacacacagctcgacaacctcgccacgcccatgtaactcgcacgtccgtcatccatgacgtctcatcccttctgctatgtccgttactcgcagccaacgccgtaccttaagcatcacggcatctacagctacaacacttaaataagcgagtatccacgattgaaccgcgaaacaatgtcttcccatccaaccggctaccggaaccggtaaaagccgaaagaacgaaatctttacgccctatgcacgccaagcgccataacaatgtttgcgatgaacttatcgtacgacagtaacgtcgatggctcataggccaccccgtcctcgggattcgcgaacacaagccagacggcctggtacaagctctttcgacggagtcggtcacagagcagcaaaaaacgatcaaggtacgacgccccctcgaaatcagggtcaatcggaaaatgcgctgaccgcaccccacgtccgacaatccgactgtccggacaatcgtgaactatcatcacatagcccatgaccggcggaatactgctggaaccgagcagattctcatcgaacgccgtatgcgcgtcaaatgccgagccaattgattcctccgcgcggttgttggcgttgttcccgaaggaactgttgatgctcttcaattcgatagcgctcacgagttcgccattgtcaagcgccagcaagtcccagttcttggtgggacggaaccagcccggtaatgtgcacatgcgtccttggtcatagacctcatcaggatggaatcccgcattaatgagatcgtcacgaatgatagctgcaatcggatccaggtgctttccagacgtgattccctgccgtgctccctgatcgggatgccctgctgcagcctgtgcctcgcgggcgcgttcgattgagtcgtacatgccgagaatcgcgtcctcgatgtcagatctcattccatggcctccttataagccgcttcggcgaatttcgtcgccaaagccctgtccttctcgttaaaagcgcgtgaaagtcccaatttgttcgtgtcacttatttggatatattccggtatatgcaccaagcgcaggtactgtgcctgaaagcgcaacgttcctccacgcatcttgacaccaagcgcatcgatgaaacgacgtgtcgtatcggccataagcaggccgccgagaacctccaaatcccactcatcggaagtgatccagtagcagttgtgatgcggatactttccatgcgacagaatcggatcgggccgagccgccatatccggtataagcagaaggttccggtcaagcagtccgggtgtgagcttgtcgatagtgcggtaccaggcagttttattctttttcgcgacgtaccgtctcgacagccgttccttgtttgtttccaaataggttttgagtcgtggatatttgtcgaggttgaccaaagttccgtcgtcattccacgggtttacaagccagcgttgcctatcgtcgttcccacgacgatgatcacgcatgtagaaaatcggcaccatacgatcagactctaccaaatcatcgtcttcagtaaggaacacatcatcacaacccgtggcaataccgataccgagtttcacgccggcctcttcgagtttcggcaacctttcacacgcctgcgagacgaatctcactaggtcatgattaccgagcggatacatcctagcaccggtcggcttatcaatctcgaatgcttcaaatcgctcaccaaccagctccggctcgtcgtccatcagccagtcgaggacggcggtggcgtcggcctcgttgaattccggggcgcagttcacgaatttcaaatgatcggccgacacacccttgcgaattgtcgtgatcgccggataggcatcgacctcatcatcgaaggcatcaacgccgtgcatgcgtacgagagacacgagatcgcaatccgtgcccatacgagatctcaacaacgtgccgtacttgttctgcagccatcggtcggcgcagatgaagcatagcgtgccgccgtccttcaatgcatcgagacctcggtcgaagaaactcacgtacaggtcgcatcccgttgttaccgaagagagttgtttgacgtaaaacgacctcttcgtccggtcaatttcaacagcccggacgtatggtggattcccgacaataaaatcagcggcaggaacgtcatcaagaatgaaatcgccgtgtacgatccactgctcgcaaagctcccgagcctggatcgcggggcatcctcttgtcatcaatgcctcgacggcggccttccttgctgtctcgatcgacgcggagtctatgtcgtaggcgcggatcgcgttccccaacgacgtccaacctttgccaacggcaattgcatcatcggccagacgtccggcaatcacggtcaggaaagctccgcacccgcaggacggttcgatgatcaccttatccgaaatgccggtgcccggcacatagccggccacatcgagaatcaggtcgacaacccattttttcgtatagacaacaccgtggtgcgtagatgccataatcctcctgaaatcagatactcctcagtatcacctattagaaatcgacaacgagtatcggcacgacccgtgaaacgctgttctcagccgaccaaacaccggaaatccccagcatcacttccatgggcgggaggttatcccttagcatggctgcgcgggcggaacagaaaagttctccgcgcggcgtcgcatctcgaattcagatatagtttcagttccgaacatcacgccactccctttctccctgattctcatttcgtggcccagggccttcggactaatgacccatatggtgcctaggacctttgtaatcaatcccggcgctcttgccatccccgtcttgccgggcaaggttcttccgcagcgtgtcgccgaatctgtccagcagatccgctctgttgcggatcggaccggacgcgcgaagggccttgccctccctgatcccgcgaatcgttccgatgcgcttcgcgagctggtcccggatggcgtcgaggcgttcgggagcgaacatgcgcatgcgcgacagttcgtgcgccgcctcgtcgggccagtccgacagggcgtccaggtcgaaccggctccagtcctccaccagtctgagctgccgcaaagccgagggcttgccggtcgcggtgtagaacggcttggcgaaccagtcccggccatccacgtcgagctcgccgctccacaggctcgctcccgtgtcgtagatcggggccggacggacctcgagcgtctcgatgtcgcggatcagaccgaaattgttgtagtgccggtcggtgttgcgcatgaggtagtcgaccacaagccaatcgtccgtggcgtcacggatctcccgttcgccgactccgaagccgactgcggcgtggatccactggtcatgcgagttgagtccattggtggttttgacggattggagcacctgccaggcggagaccagctcctcatggctggtgagcatgtcctcgcacgtgcagaccaagcggttgccgctgcgcgccggcgaatacgggacggcgggaacgcccagccgcacgcagagcttcgaggcgatgacctcgttcatcggctcctggcccgtacgtcccgacttgacgagcagcctcctgccggtggttttgtcgatcgtccagcgtttgggaagatcgccgcccgtggagacgtcgggagcgttgaggctgatgtcatgggacgacgagtacgaggtgagcaggatctcgcccagcgcctcgtcgaagggattgtcgaagaaattgatgtccttccattcgaccggatcgtcctcacgtttgacccagtactggtccgacaggctcagcccgtaggtccgatcgagcagctccccggtcgatgacgcaccaagcgattcgagcacacggcgaattccgacacgggtggagggaatggcgcgggacctccaccattcgtcgatcctcttggcgtacagcgcgctcttgccgtgcgtggtgaactccaggggcaggcgattggggtcaaggacctcgcccgaggagcacgcgcggccggacgcgggttcgtattcgaatgcgaggaccggatggtccccgcacatgatcagcttgcgtggcatgctcccccttcctttctgactcggcgtttcagaaaataaattctacaggcgcgaatcgaacgtgggtgcggcggcccgtttcatggcgcggcgctcggccctggttggccgctcgagaatccactcggcgagcatacggatgaggatggatgcgacgatcacgccgatggatccccagaagcacgggacgaagtccgatttagagtggtcggtccagaaccaggcgatcaaagcgagcatcaatgccaggccggcggccagggcggcgagcttgtggaacacgagggcgagcgtgcggatgggatgcgtgaccagtcccaccgccagcgcgacgacgacgagcagtgcgacgaagcccgcggcgatgatggcgatgcccaggtatactgcgagcatatagagtccgaacatgatcggtccttccttctctcttttctagtccgtttcttcgggcaggtaggtgtagtcgacggcgacgccctccgcctcgagcagcacggcggcctcacgcacggcggcggcgcgccgtttcgcggacgcctcggccttgatccagtcgggcaggtcgtcgggcaggttggagacgcgcgagaacgagagcgtggcccactcctctcccctgtggcgttccacgatggccacgacggcacgcctgtgttcggcgagatagtgctcgagcatgtccttcatcctatccgagggttggatccggtatttctccgactcgtatttcttgaccatgtccacggtgaggttcgcgagcacggccacgtcgtgctgggtcatgccgatgcgttcgcgcgtcgcgcgcatccacgccttggactcgctccaatccccttccgccatgatccctcctggatattagaaagccgggtccgcccgcgcgaacctcgattatacttttagtataatcgaggttttcggcagggcggacccggcgtttcccggtttcgtcactcggtcggggtcggcgggttgtcgccggcgttggccttacgctgctggtcgagcatttgctgctggatcagaacgctgttggtctgggccgcgtactgcttctgggccatgtccatgctctcctggtggcgttgcccttcgacgtcggcgaagacgagctgctggatcgccagcgcgagctgcatgagcttggccttcttcaggatggacaccttgacggtgttgcggccgccggcctggttgacgaagtcaagctgcgcgctcatcgtgttcgccaggttcgcggcggcgagcacgaggaacaggatccccacaagcgcgctgtccttcatgcaggcgagacccgcgatgaggaagatgttggtgtccacggacgcgatgttgcgcaacgggatcgtctgtgtggacgagccgagcgggattacgcccaggagggtgttcgggctcttgcactgcactcgcatgctgctcgcggcgatgctggtcttgaaccagaacaggatcaccgacggactgaaccggtcgccggtgatgttggtctctttagtctcctttctctagtgtttattgccgaagtcgaagatgacgccgcgatccttgtcgacgacgagcgaggcgtcgaatttgctgcccttcttcgaggtgaagcccttcaggctgaccttccgtccggcgagcagccggcgtatggcggagtcggtgacggttttgccggctacggtcgtccaggcgcgccagccgcatccttccgtggtcctccatgtgccgtcggattgtttctcgcgccggttggtggagcattggaacaccttgcccgttttgatgacgggcttgccacagcgtgggcatgggccgaacgactccgtgttccgcgtcttcgtctgcacatggtcctgccggacggtggaccgcgcgtcggccgggatgcgcacggcgaggtcgcggaactccgtttcgacctgcgcggggtcagcgtggttgtgctcgacctccgagagtcgtcgttccatgccggcggtcaatgccacgtccttgagcttcgtggcgaccacgtcgatcagggatcgtccctgatcggtggagcgaagctgcttgcccttgcggtccacgtatccggagtggacgagctgttcgatgatgttcgccctggtggcgggcgtgccgatgcctcccgagtgggattcgtcgtcatccagggcggccttgagttccttgtcctccacccagcggctggcgtgctccatcgcggcgagcagcgtcgcctcggtgaacggcttcggcggcttcgtctttccctcggacagtgtcgcaccgccctgcgggaccggcgcgatgaagaccccgtcggtgaggttgacagggatgatgttgcccgcggtctcgtcggtgtcatcctggtcttcctgcggggcggcatgctcgatggcgtgccatccgggcgagacgggctggtcggaacggctggtgaagcgacattcgctttcgggcagaaggcggccttcgtccggatgcttttcgcaccaatgcgggtcgatgttcgcgacgacgttcgtcacgtcgtgcacgtagtcgtcgcccacggcctcccacatgcggcgtgccacgcgcgtcagcacgaggcgttcgtcatcgccgagttcgtcgagcgccgccctgtcggcctgcatggtgggaaggatggcggtgtgtccggcgaccttcgcgtcgttcacggtcagttcgagtcgcggccgttccggtttcgcggacggttcgatgaagccggtgacgagccggtcgccttcggcgagggcgcgcagcgtgtccaggtcgtcgtgggtgatgtaccgcgagtcggtgcggggatacgtggtcagacgcttctcgtagagcgactggagcgccgtgagggtgcgggcggcggtcaggccgtgcagtctgctcatgtccttctgcaatccggtcaggtcgtacaggctcggtggggcgtcgtgctgctgcttgcgttcggccttgaggatctggaaggtgaaatcgtccgagttgacgatccgcagcagcgtctcggcgtcctcccccttgtccaaacgttcgccggtcagcttccatccgcccatcggggcgacgaccttccagtacggtcgggccacgtggccggcgatttgccggtcgcggtccacgatcatggcgagcgtgggcgtctgcacgcggccgacggtgaatctcgcgttgtagacgagcgaataggcgcgcgacgcgttcatcccgatcagccagtcggccttcgcgcggatcatcgccgaatcggcgagtccctggtattccgtctcgtccttcatggacgcgagggcgccgcggatggcgtcctcttccagactcgcgacccacaggcgtcgcatcggcttggagactcctacatgcgccacgatcctgcggaagatggcctcgccctcgcggtcgggatcgcacgcgtcgacaagcatgtcgatatcgccgcggcgcatcagtcccgcgacgaccttgtactggcggtccgcgcccttgtcccggctgaccttccattgccagtcgggtgtcgggtcgatgggcagcgtgtcgaggctccactttccccaatcgtgattcttgtattcgtcgggcgcggccaggtcgacgaggtggccctgcgcccaggtgaccaggtcgccgccgacctggatgtagccgtcgtgtttttccgcgtgcccgccgaccgcctgggcgatcgcctggccgaccgaatgcttctcggcgatgatcagtcgcatctcgcatcacgtccgatcatcagtagttgccggacgcccatgcgggccgtccgtcgtccgaggtgtcgggttcggctgcgacctcctgcggggcggtctcgtcgtccgccgcctggacgtcggatccggtcgtctccggatccgattcggcgacggtttccggttcgggttcggcgggcggggttttccttccggccggcgcggcgacgagctcgcccttagcatcgaacgcgacgttcttctccgttccggtcatcgccagcttgtccgcgatcatcgtccggctcatgccggggaacgcctcctcgaattgcctcgccgcgtcgcgcagcgcctgcgcgcttttgcggaaattgtcgagacggctgtcgaacttcttcgccgccacctccttgcgcttgaacgactcgcgttcgtcgcgcaggaagtcgtccacgtaatcggatgccatggtcgtgttcctttcctttatcgagatccggcccatgccggctatgaaccatgctcccgccatgtggacggctccggtttggacaatcggctccgccaggatcacgcggacgtgatcctggcttcgccgaggaaacggagcggcggcatggatgccgcgctctgccactgccaacccttcctgtatttccaggcgtcgcctggaagggaatggttggccggccatggttcatcatcgcgacaccacgcccgcgtcttcgggcctgcgtgttccatgctccgtctcgggaagggcttcgcccgattctccctcgacgggcacggaccacgcgtcctccgccgcgcggcggcaccgcaaggctgccccatgtccggcgaaaggaaacgccggcggaaccaaggaggaaccatggaaaagaaatcaaccgaccttcagcacgtcgtgttcgagaccgaggaggcggggcgcgtcgaggcgatgtggagcagtctgcgcctcaacggccaagatgttccggacgggtggcaccgctacgccgtcaggggcggggacgacggatgggagccgtgcagcatcgaaccgttcgtgtgggtgaaccacaccgccgacatcatcacgcccgtcgacctcgagctcgacaagcacgaccggatgctcaccatcagggactggtggtttgacgacgagccgttcccggccgagtgacgggccgggaacgatgccgcccgcacgacgcgggcggcgcctccagcggccagaggacagctaccgtcctctggactccaatatcctagaatggaatacaacgagagccaggaggcgacggacatgaccatcgactattcaatcaaagtgacccaatgcgaacccatgcccggctacaagctcaaggtcacctgttccgacggggcgaccggaatcttcgaaatgtcccgatacgtcgaacgcggcatgttcaaaccgctcaaggacacgcagacgttcgaccgcgtgcgactcacgttcggcgtgccctcatggcccggggacatcgacatcgccgcggaacgcgtccgctccggcatgcaaatcatctaggagcccgcgcgcccctgccccgaccgtcaccaagacggccggggcttttttcatgtctgcatgcatgacggacatgacgcgccgccgaccccgcgttttttcgcgaggccttttcatttcccgcgctccaagtgtccaaacccatcgccgttcccgcgacggacgattggcgtaagacaccggccttcccctcaaggccatgagcgaaaggagcgaggagtgaacgcgatcatccttcacggcattgcgcaatcatgccgtgcgaaatcgctcccaatccatgaaatggatatgggagcagcaagcgacgtgattggatatccaatcactcgattcgcgatgcgaatcggcttgccgggaagacccgtgccccatggtcggcggagcctccagaccgctcgcgcggcatcacagaaaacccgtccccacacctcacacggaggcgtggaatgagccgggccgagaacaggacgcactgcgtcgagaagatcatcaggttcacgccggacgagtgggagcgggtgcggaagctgtatgaggagctgaccaggtacgcgccggagcaccggtcgttcagctcctacgcgcgcaggatgctgtccgaacggcgcatccacgtcaccgagatcaggccgctgacggacccggagccgatcgcgcgcgagatcgaccgcatcggcgtgaacgtcaaccagatagcccactgggccaacgcgaacgagcacatcaccgccgggcaggtggccgagctccgcgcgtcgttcgaccgcatcgagcgtctactcggcgacctgttcgccgacaggcgcgaagcccggaaggacgtgtgagcatggcggtggtcaagctcggcaggcccgtgaaatcgaatctcggcggcgacaacggggcgatggcgtacatcatcaaccccaccaagaccgacggcggaagactggtcagctccaactacgagcggaccaggacggactacgatgcgctggccgaaggcatgctcgacgacaaccgcagatcgccgaaaggcatccggaaggacagccgtctggcctatcacatcaagctgagcttcagccccgacgaccccgtgacgcccgagcgggtgcacgagctcggcgtggagttcgcgcgtaggatcacgggcggcgaatacaagttcgtggtcgccacgcacaccgaccggcaccacctgcacgaccacatcatggtgtgtgcagcgtcccgatacgggaagcatctgaaggccgagctgcccaaggacatcatcgaccagtggcgggcggtcagcgacgagatatgccgccgcgaggggctgagcgtcgtgttcaaccccgtcgtggaggaacagacgcgcaagatgcgtggcggtacgacagccgccggcgacgccggaacgtcgccggcgcgcgaccccaaatacgtcgatgaagcacccgtacggagcgcgaacgaaccggagacgaaggcgcggaaggcctcgggcggggagccgttggaacgccggtacggcatgtcgatggaggagatctacgcgtccgcgaaaggcctgggcgtcaaggacaggctccgcatgctgatcgacctgacctcgtccacggcggagaacttcgaggactggaaggacatactcgacatccgaggcgtggacgtgacggtccgcggccagcacctcacatacacgctcaaggacaccggcttcaagatccgcgacgcgaaactcggccaggcatacgacatgacgaacatcatggccgggctgcaaagcacgcccgtcatccccatcacgttcaaccgcagactcgtcgccaaacagaccaggaagacgatcaccgtgtggctgccaggcacccaccggaagaagaagatcacgttcgacgcgaaacgtctcgtggacgacggcggctccacactgcgcgcgttcctcccccgcgaccgcgaccagatcatcctcgacccgtccaaccggtacgccggcaagaccccgacgcccggcctctaccagtggttcggcgagcccacaagccggctcgaaccactgacctcgcccgaacggctgcccctcagatacggggtcagccccgcccagcagcgctactaccaggcacaggcgcgccgcctcgaccgcctcgccggcgaggcgaaggcgctgaacgcggcgatccgctggaccaggctcgcgggcggcgacagcgccaagggactcggtctgctgcgtgcgaagatccgcgaatcgcacgacgagctccagtccgccgtcatcgcgttgcacgacgcgatccaacgcggcgaccccgacctcgtggccgagacacgcggcgagatggaacgccgcgaggccctgtgcaaccggtatgagggagagctgtccgccatcgaacgggaaatccacacgacccgcgaccgcgagcaaacggagaccgagcagcgcgaacagcagcagcacaagcgtggacggtccatctgaaccgtcccaggaaacaccaaccgacaacagaaagggaaccgcaatgccaatcgaggaacaggctgaggagaagatccagaacgccgtccagaccatcatcaccggaggcgcgaagctcatgctcagaatccccaagggcgtggccatggcgatgctccgctccggcatgaagctcaccaagaccggcgtatacgccgcgggcgaggccgtcaagaacaagatcgacagcggcgagatgtccgagaaacgattgcaaagaaagaaggacggcgacctgcacgagctgcaactcgacgactcgaccatgcgcgaagtacagcacagcctcaagaccgccggcatcgactaccacctcgaacgcgccgaccaaggccagttcatcctgcacttcgccggcaaggacgaagaccatgtccgccacgccgtgcaacgcgcgttcaaaggcatgggcctggacgtcaccgacgacgacttcaccgtcgagcacgcggcggcgacggaacagacccgcaacgaaccggaaaccccggcacgggagacgcccgtcgaaccggccacgaagcccatgccgacgcagcgcatcgcctgggacttcgtggacccggaggtcatggagatggccgcgaacagcctcaccgcccgccaccccgaactctcatgggacaagctcatgggcgacacaacatgcgacgagcaggccggccgcaacttcgcggaccgaatcatcggcaaggccaccgccgacccgagcctgcgcgacgagctcgacgacatcctgcgcgacgactacgggcagggcgcgcaaacccaggagcggacacgcaagcagacgaccgagccgaaccggaagacgccgacatcgaagccggaaagcgaaccggaacccgcaccggacgaagcccggacaccggccacgcgacagcagacacaggccagagcagacaatcccaggccggccggcaaagagcaaaaaccgaagccgatccgatcgaagaaggcactgcttgaacgcttcaagacccgactcaacgagaacctcgccgaacagaagaaccacatgccacccacccagaacagggaccgcacgccccgcaagggccgctgaaaggaaaaaccacaatgaaccagcaggaacaggcgacgaaacgcgccgcgatcttccaggacaccatcaacgggaccaacgacccgaccccatggccggtgaccatgtgggcctcgtccggcgacacgatatggacggccggcacggcaaggactgccggcgaggactcggtgggcatgatctacgctcccggcgaaaccatcgcccaccggaacacaatcgccggcgacaccacccgcgccaccgaatccttcgccatcagaccggagagcggacagagcccgatggacgcgatgctcgcgggcatcgaacagtgggaccaccgccaccccgaccagtgggacaccgtgaccacaccgggcgagtaccgcatgacggatccgacgaccggccgaccgctcccgatgggatggagcgacagcctcgccgtggccgcgtccgcggcaggccggctcgaccccgacctgctccaggccagcctcatgcagaacgcggtcgagcacgagccgcgcccctgcgtgttcttcctggaggacaacggctacgacctcatggtcttctcctggcatcaaaaccagcagggactgttcgacgcgatgacattcaaacacctgcaatacgacgacctgagcatgcaggtcacgaccatcagccacagcgaggacatgagggaatccttccccgccaagaccatgagcgacggcgaactgctcacccaaagccgcgtctaccgggacgaataccagttctggcgcgaacacgacggcggacccgtcgcccacggcatgaccggccgcgtcatgcgcagcggactgctcaaaccgggactggagcagaagccgctgctgaacctgaacgacggccggcgcgccccggactgggacgagttcaccgaccaggccgccatctcgatcctccagggccgccccgtctcaccgacgccagcactcccccagcaggagcggcccggacggtccgccgatcccgcggacgagacgccggaacggcaggaaccggcgcacgcgaccacggccacgagacaggtctggccgaacgcgtgggtggcgaacaggctcgcgcacatctatatattgcatgcgaaggacggacgcgactggccgaagatgatcgtcggactcccccgcggcaccgtcatcgacggacaggacctgaccggctgggccaccgacatgttcatgagcggcaagaaccagagtcagaagaacgagggacgggccgtcaacctcagattcagacccggcaccccggtcgaactgttcaccggccgcggcgcggaacgccgcaacgtgcaggtcgacccgcagacgctcgtccaggcaatcatcgacgcgcagaagcgcagccgcgacgccgaggagacgctcgacacggcatcggtggaactcgcctcgaagaccgtggaggaatcctggccgcaaatcagccgcatgcagggccggttcacggaataccggcgcgctggcacgtacaagccggccgtcgcattgaaatgggcgcgccgcctcgtcgaccggaccgccggaggggacgagggacggtggaccaaccgccaacgccgtcaggccgccaggctcctcatccaggaactcgccggcgcacatgaaccgatgcaggacagaggcaaaacgccgacccggccaaccatcgaacaggacgcggaggcgacggacacgccacggaaaacggaaccgaccaaggagacggaacagggacgggaccacgacgaagccggctcgccggccgccgacccgggagcgaaagccgaaccgccggagacgacgcgccgcgacgatccggagcgacggcacacggacctgaagtcaacgctcgaccggttccataccaagctcagggagaacctcgacggactcaacacagccacgccggcacccggcatcgaccggaaccacggccaacggaaaacactataagaaaggggcgaaccatggcgagaaaacgcctatacgcgaagcagacggccccggccgaatacgagcagatcgacctgttcagccttttcgaagaggaacaaagacaggccgacaggatagcggagcaggtgcgcggatacgagataacggtgggccacgtcgcggtacaacggctccgcgcgcgcggcgcggacgacgagacgatagccgccgtggcggccgaataccgggagaaccggctccgcggactcggccggcgggacgcgcggatcgccgccgagaacaagctcggggtcggcgccgccactcccggcgaaaccacgccgcaacctgtggtaaaacgttttacacaattctccggcacggaaaacaacactgaagaaaggaacaacaatggacgagatgacatggaccgacccacagctcaaggcacgctacgaggagaacagcaggaagctggaacatctgaaggagacgctgccgaacctgtattccgaggacgcgctgccgtacaaggtgttcacgacgaacagcgtccacggcatccagcggatgcgtctcatctggctcaaggagcaccatccccagtggttcagggagatgatgatggccaacgtgctcgaggagcatctgcgggacatcgagacgcgcacgagggaacgccaggcgcagatcatggaccaattgatggagtccaggcacctgctcaaccggacggactgcctgaaggcggcaccacagctgaccgacctggaccggctcaacgggatgaacgaggcccagtcggagtcgatgagcatggcgatccacgaggtcgtggagagcttctagcatccctcgacgcgcagcgcgcgcgttcgccccgcgaacgcgccgaagcgaacatcgccgccatccagacactcaaggaactcggcggagacaacggcggccggccctcagcgaagcaaatggatacgctgcgcggatattccggctggggcggatgcgcggacgcgttctcggacaagcctgaatggcggacgatccgcgacgcgatagaacaggccctcaccccggaagagtacgcgcaggcgcgcgcctccacactgaccgcctactacacgcccggcccggtggtcaaggccatgtgggacgcgctcgacatcggccccacacccatccaggtgctggagcccggatgcggcaccggcaacttcatggccggcatccccgacgacgtcgcggcgcacgtgtcgggcgtggaactcgacccgatcagcgcgcgcatcgccgccgcgctgaacccgtacgccacgatcctcaacgcggacctcgcggactgcaccatccaacagggatcgttcgacctcgccatcggcaacgtgccctactcgggcgacatcagcctcgactaccggaccacggacggcggcacgtcccgcctccccctgcacgactacttcatcgaacgctcggtggacgcgctgcgccccggcggcgtcgcgatgctgctgaccagcaggtacacgctcgacaaacgctccgagaccatgcgcgccgacctcgcgaggaaagccgagctcatcggcgtggtgcgtctgccgtcctcgacgttcgcccgccaggccggcaccgaggccgtcaccgacgtgcttgtgctgcgcagacgcgaacggacgctcgaccgcacgcccgacgaggcatggatccactccacaccgatcgccgtgcccggctaccaggacgtgaccgtcaacgtcaaccaggcggtcgccaacgacatgcccacgcacgcggtgggcgacatcagaccagtgatcggccggttcggcggcgacttcgacgtcgtcttccagggcgacacggaacagatcggcgaacggctccggacgatgctctccatgcaggtcgcccacggcaggccgccgttgcagctgggcgagatggaaccggccgaacgcgcggaggtcatcgtccgcccggaccatgtgaccccgttcgaatactcggtcgaccctcgcggcgtggtctggtacggcgacggcgccaccgtcaccgaggccgcccacggtcagggagacgaggcgcgccgactgcgcggcatgatccgcctgcgcgacctggcgcgcgaactccaacgcctcgaactcgaccccgcccgcgtggacgaccccgccgtggaggccaaacgcaaggaactcgaccaggcatacgaccggttcaccggcgagttcggacgcctgaacgaccgcgccaacctccgcgcctacgacagtgaggaatccggccgccacctcgtcatggcgttggaggagaccgacgaaaaaggaaggttcgtcggcaaggcgaaatgcctctcgcagcggaccatcagccccgtaccgcccatgcccgaccatgcggacagcctggacgacgcgctgaacatcagcctcgaccgcgccggcagggtcgacctggaactcatcgcgcgcctcgccgacaccaccgtcgaggaggccgaggccggcctgggcgaccgaatcatacgcgaccccgacaccggcacggtcatgcccgccgaggactacctcaccggcgacgtgggaacgagactcgaccacgtcacggccatggccgaacatctgagacgccgcgccggcaccgaggccatgaccgagttcacggcatccacctacgcgacgccggaggacatgcccgccacggagcgggcaagcgaatggatcagcgaggcgggcgcggacgtgtggcgcagcctcaaggacccgtactccgccgaatcctacagggatccggcaccggtcatcgaacgcatcaacggccgggacgcatggaccatgggctggagccgcaacccggaactcgtcctcgccctcgcctggcgggcggtggaggaacttcccgaacagcacgcgcgcgtcaccctcgaacggtccgacaccggagagaggaagccgtggcaagcgccggcatggcaccaatcgcacggcaccagcccgctgtgggacgcattgtgctggacatggcgcgacggcgacgccccgcagaactacgcgccgatcctcgcggaccgggacatgcccgtcagggacctcgccctcttcgtccacaagatcgcccacaccgaccggctcgacaccgccgacaagacagcgatcctctccaacctgttcgaaagctggcgcgccgacgacgcgaacggccggcccgtctggacggacacgaccatcggcggaatggcacgcactctcatgcccgacaccgacgatcacacgcggctcgccgaacggctcgccaccgacatgtccctcagcgaatggatctggggcatcgcccgcgacatgcccgaagacctgcgccaagggcagaagcacaacgcctacggcgtcccgccacgcgtcgtcgacgcacgccccgacgactaccaggcgttccacacacgccgcgaggaacaaatcaagcaatggcgggaactgccggagcacgccgaggccgcgcgcgccgaccaggcggacgcggaacggctcgaacacgtggccggcctgctggaacgcgtacagcccaccccattggaggccgagcagatcaaggcgccgttgggagccccgtggatccccgccagggacgtccacgacttcatgatggagacgttcaacgtgcgcggccacgggctcacgcccggcaagctcgcccaatactcggtcgactggattccccagctcggacaatggcgcgtcggctactcgggcggcggcgacatcgactacaaggccgcgaagacgtacggcaccgaggaccgcaacccgttccaactgctggaggcatgcctgaacaacgcgcagatcaccgtcaccaaggactcccccacggagaccacggcatccggcaaacccaaacgcgtcaaggaccagaaggccacgatggccgccatcgagaaggccaacgcgatccgcgacgcatggaaccaatgggtgttcagggaccccgaccgcgcgcgaaggctcaccgccctgtacaaccgcagattcaacagcatgcgcccccgccacgtcggcggatcctacctgaccacgcccggcatcgcccacggcgtccggctccgcccccaccagaaggacgcggtggcccgcgccctgcgcagcgacgagggaaccctcatcgcccacgtcgtcggagccggcaagacgttcgagggcgtcgccctctcccacgaggcgaaacgcctcggcaaggcgtccaagccgatgctcgtggtccccaaccacctcgtggaccagtgggccggcgacgtgctcaggctctacccggccggccgtatcctcgtcatggacaaggacgcgcaacgcaaccccgaatcggtgcgccgattctggggacgggtcgccaccggcgactgggacgcggtgatcgtgccggaaagccggttcagccaactgcacgtcagcaaggaacgccggctgaggaacatgcgcgcccgcgtcgatgagttcgcccatgccgtcgaggccgccgccaaggccagaggcgacgacaaggacccgaccgtcaaacggctggaggcggcgcgcaaaagcgccgagaccgccatgaacaggctgcgcgacggcaaggagtcgcgcgacgacaaggcgctggcgggcatcgagttcgaatcgctgggcgtggacatgctcatcgtcgacgaggcccaccacttcaagaacctcggcgtgcccgtcgcatccgcggacctgggcatgcaattgtcgtccgccgcgaaatgcgaggacctgctcgacaaatgcgaatggctgcgcgaggccgggcacggcggcaacatcgcgttcatgaccggaacgccggtatccaactccatgagcgagctgtacaacatgcagcgctacctcgcgcccggaaccctcaaggcgcaggggctggacacgttcgccgcatgggcgggcacctacggccaggtcgtgcccaccgtggaactgaaacccgaaggcaacggcttccaggtcaagcaaaggttcgcgcggttccagaacctgcccgaactgatgaacgcggtgaagcagttcaccgacatgatcaccaacgacgacatccagctgcccctgcccgaactggaacaggtgcccgtgccggtacccatcaccgaccggcagaaggaggagatggaggaactgtccgacagggcggaccgcgtgcgcgacggcgacgtgccaccggaggacgacaacctcctcaagatcacgggcgacggacgcaagatcgccctcgaccccaaactcctcaaaggccacgaaaacgaccggccgttggagaacggcaagatccaggcatgcgccgagaacgtcgcccggatctggcaagaggagacgccgcgcctgggcacgcagctcgtcttctgcgactcgagcacgcccgcatcgggcggatggaacgcctaccaggacctcaaggaccggctcgtggcgttgggcgtgccggccgagcagatagcgttcgtgcacgacgcgggcgacaaccccgccaaacgcgagcagctgttcgccaaggtcaggtccggcgagatccgcgtgctgatgggaagcacccagaagctcggcaccggcaccaacgtgcaggaacgcctcgccgcgatccacgacctcgactgcccctggcgtcccgccgacctggaacagcgcctcggccgcatccaacgccagggcaacacgtacggccacgtgcgcgactaccggtacgtgaccgaaggcacgttcgacgcgtacagctaccagaccgtggaacgcaagcaaaggttcatcagccagctcatgagctcgaagagccccgcacgcgaggccgcggacctcgacgccgacgtggtgactctcgccaacatcaaggcgctggccaccggagaccccgacatccaacgccgcatgacattggagaacgagatcaaccagctgaagctcctgcgcgcctcatgggcgcagcagaaagccgacacccgcagggacatcggccagcagctccagccacgcgtcgaactcctgcgccagtcgatccgcgagaaggccgacgacaagccgctcgcctccaaggccctgggcatccaccagaccgcccgcatgaacggccgatgggagggcatgaccatcaacggacagccggtcggcgaccggcagaccgcatgcaggctcctccaccaggccgcccaccaggcgcacgacggggacacgatagccgaatacgacggcctgcccgtcatcgcacgccgcgccgacaccaccggacggatcaccctggccgtcaaggcggtccacgaacacgaatccggcagcgagatgcccggtccatacctgaccggaccatccagcatcgtcagccagctcgaccgactcgtcaggaacatggccaccgaccccggcaagctcgcggaacggctggccgacgccgaaagggagctcgccgccgcacaggagacactggccgaaccattcgcccacgaggacgaataccggcaaaaacaagccgaactcgaacggctgacgtccaaacccgacgaaccccgggagacggaaagtagagaccaggaaaccacaaaaacggaaaggagcgcacgcatgccattgacacgggaagacatcagacgactgctcgaacaggaccccaatatcgacggcatcacccagggcggcaacgccatgggacactacctcgaagcccggctcacggacggccgcgccatgcagatcgacctccacgacaaccccgcatggaaggacacggaccgtctggccggccggatcgaggtatcctacgccaaccggccacagacggaatggcaatacgacgacaacgatctggccgaccgcgaacacaccgtcatcgaccccgccgaacccgacgcgctacaggagctcggcaaggcggtggccgaatgggaacgcgcgggcggcctccacaaggcccgcgcatccgagccgagccacctggccgcgcaccagccgccggaggaatacgcctaccggtggcggaaacccggggaccccgacaggcacatcgcatacctgagcaccgccttcgaccgcgaccaggcgatgaaggcgagggaggacgccggatatctcgtgacgaaggtcgaggaggatccgaccatactctacgagcagcaccgcaaggcatcctgcatgcgcgcgagccacatcctggaacgatacgaatcccccgacccggccgccgtcagaatcctgcacagcatcgtgagcgaggtcaacgcgcacgaccccgagaacgacatcgccgcctacccgtcagacaaggcgatccagctcgccggcgacggtctcaccgaagcggacatcgcggagaaacgcgagatgggcggatgggatccgcggacggacccgctcatgcgcaccaacgagcagggcgactggacgggcgtcacccagcagcaggccgaccagctcgtctgggacaaccgcgacgagatcctcgcccgcgcctcatacgacggcgaactgtccacttggacgctgcaccagctcgaccagctgaaggagcacgagccggaacgaggccgcgacctcgaccggccggagccggaacgcccagcgcccgcgcgggagcagcacacacccaaacgccacggactgggactgtaggcccacacacccaccgggggcggcgcgcggcttcgcacgccgcccctcaccttataggaggaacatatggcaacggaagaacagcgcgccacggagcccgtcatctggttcgagggcacgctcatcagggacccgcaaccacacggaggacacgacgactggctgctcgaggcactggtcgatccggacggaaacgggcgaaagatcaccatccatgccagcggcggggatcactcggagaacatcggccgcaacgcgcacaagggagcccgcctcatggtcaagggcaccgccggagacgaggaatccggcatcgacatcgaggccacaagcctcgcattcgaccccagccacgacgagccggacggagagcgatgacacggaccaccgtcagcgccaccaggccggacaagaccggtgccggcgaatggatcgacatccacagccgcaccggccggctcatgtccacgctcatggccgacggccaaccattcagcatcgacgtcacgccggacggcatgaccaccgtcacgcccctcacgtccccgaaggacgcggcgcaggccgacggcgacaacgccaagaccgggaccagcccggacggcgcgaggatcaccagcaggaagacgctgtacgagcggttcaaaaccaaactcaaagcgaacctcgacgaaagaaaacaatagaaaggaaccatcatggaacgaataaggggcatcgtcgtcaggacgctgaccatcctcgcgggattctggatcgccgacctcgcggccgcacgcgtccaggccggcatcgcggccggcgaaagcatcgaacggatcatggatggcatgacgaccatgctccagcatccgaccgccctgggattcgaccggaccagcctcctatgcggactgggcggcgcgggcgcggtcggcctgttccacctctaccggtggagtatgagccaacgcaactggcgcgaaggcgaggaatacgggtccgcacgctggtccaccagccgggagatggccccatacaccgacagcgacaccaggcagaacctccagatgacggccaccgagggcctgagcctcgacgcccaggccacgcgacgcaacctcaacaccgccgtcatcggcggctccggctccggcaagaccgccacccacgtcatccccaacatcctcaaaggcagcatgaactacgcgtgcaccgaccccaagggcgaactctacgcgaagaccggtggaaaactggagaaaatgggatacacggtcaaacagctcgacctggtggacctgaccagctggacgaaattcaaccccatgcgctacatcgaccccgacaagcccgacgtggcgataatgcgcctggtcaccaacatcatggacaacaccaacggctccacacccaaggagcaccagaccaacgacttctggaccaaatccgaacgcagcctgctgaccgcgctcaccgcgttcgtctactacctgcccgacgacatcctcaaggactgcctgaacatcgaagccggccagaccctcaacgcggtggccgacatgcgcgacctgctcgaggccagcgaacaggacgagaccaaggaaagccaggtcgacgccgtcgcccggaccgccactgaaatatacgaggagacccgcgccgaatgggaacgcgagggcgcggaccacgacgacccggacctgcgggaggcatggcgtctcgcccagggcctgaagttcgccgcccgccagtaccggcccttcacccagggcgccggagagaccaagaagggcatcatcatcagcctcggcgtgcgcctcgccccactgaccgtcggcccggtcagggagatcctctccgacgacaacctcggtatcgaccggatcggcggataccaggacgagcacgagggcggctacagacgtcccaacaaaaagacggctatattcctcgcgctgcccgacgaggacccgaccttcaacttcctggccgcgatcctctaccaatgcctcttcgacagcatcatccgccgctgccgcacctaccccggcgaatgcctcgccacgccactgcactgcttcctcgacgagttcgccaacgtggggcgcatcccgaacttcgacaagctcgtcgccacgatccgctcgcgcaaggtcagcgtcagcatcatcctccagaccatcgcccaattgaagaccatgtacaaggactcgtgggagaccatcgtcggcaactgcgacagtgtgctcttcctcggtggcaacgagcagtccaccaccgaatggctcagcaaactgctcggcaaggagaccatcgacatccgcaccaccagcgattcgaagggcgtgtccggcagccacaccaccaactaccagcgtaccggacgcgaactcctcacgcccgacgagctcgcccaattggacaacgacaaatgcatctacaacctgcgtggactccacccgttcctcagccgcaaggcatggccgggaaccaccatcaccaaaccgaaatccacactcaaacactccgaaggatggaggaaggccgcatgaccagcgaaccatccgccattgaagctgcgtcgaccgggcaactgctgcgcaggtacaggaagctcgcgggactgaccgcccaggaactcgcccatgaggtcaattccagatatccggacgacgccatctccgcaaccgtcgtcttcaacatcgaggcggaacggaagaccgccatcacgattcccgagctcgcccacttcgccgaagtgcccgccatcagccccatccagctgctctgcgactgcgaccagccctaccttccagcccgctccggcgctttccaagggaggaccgcgcgacaggtgatagaggaattcacgctccccagggagccacggaacgatgctccgacctcggtgatcgccacggtcctcggtcttgaggagaacctccgctcgatcctgaacctgggcgacagcatgcgcaatatgcccggcggaaccgaaccagtcatgaacggcagtgcatatcagcgtgccgcgatacgcggacgtatgctcaccagccagatccgacagctacagaccgccgatgtccggctgcccgacaagacattggacgccatccgcaaggcatggcaggtgctgcgattcttcaagcccgacacagccatcatgatgccatgcgaaggacgaacggcttgatccggaagcctgcatcttcatgaaaaagggttgacgccgctgcaacggcgtcaacccgatgaataacaaatatccgatagccagtatagtccccgccctcgaagacggggctggcggaagaggaacactcatggaagcccaatttggtggcggatgctcctcaaatcgttggaattgtccattttttgcagtatttgcattcttcgctccatttttcacacccgaaaaccgttggaacgagccatttcctgcatttttcacaccattcagtggattaggggcctatgccccggcccgtctgacggcgaccctgaatctctgaatctttctctaaattcagagaaaagaacaccgaattcagagaaaaatcccgtcatgaaccaagccgagaagcatcagtatggtgacgcccgtaatagaccggccccacgagaccatccgggatggtctcggattcggcgatcatctcggcctcgcgcacctgctcctcggtcatgccgaacaatgccagcagctgcccgtcgcgttcgctgaaatcgctcactgttcactcccatcgtcatgcgggcgcacgaaccctgaacgcgaggtaagtccgtcttcacggccagcctggattccgtcccgatatggaaagagccccctggtttgagcactgcgagtaggcttagggagctgctgttatccgccatattagtcgtgtccccgcattttgggaagtccgccgcgagccccaaccaggctaggcctcagccgacgggaatgcgttcccgttccacatcatgacggacacggtcgctggcgaccgaattgattcgatcctcgacgaagccgaattccacgccttcttcgacgagaccgtcggaccagcagtcaagatagcggaacgggattgcgagcttgccggccgcgtcgaaggacttaatcgcctgctcgccaccgatgcttgagccgactccgaaaacggcctggatcatctgcttgagcagcagcggatgctcctcccccacattgacgggttcctgtttgcgccatccccggctggacaattggatctgcaaggaacgatagcgttcggagctgatgatgcccagcgcgcgagcacggctgattgacgcggcgatggaggcgccccagcccgatttgattttgaggaagtcgcttaacgtggcgttcctctggacggtgcgcgacatatcctcggcgggcagcagcaacgctcccgcgaacagatgcgcctcacgctccatctgctgcggtgtatcgggcctgcggaaccgatgcagtataagatgtcccagttcatgcgccttggtgaagcgctgtcggtcgccgccgatgcgtttgccggcggagtatccgatgcatggcattccctcgcattgcggatatgtgatgccttcgctcgtcagcctcgtcttcccatcatcgctgccaccggtggacttcatcggagccaccacaatgccctgcctttccaggctgcgggtcaggtttccaatcggaccaacgggttccaaccccatgcatgttctcgcctgattggcaatacggtcgatttcggagacggaaagctccggtgtacgcggggcgatcttccggatccaagcggtcttgccggcagtcatgcccagaagaccggacagtcgcgacaccgtggcgcatagttcggaatactcgatcgatacggcagacagctctcccatgctggatttgctggtcttgcgatacgtgaccgccgtcatgggcagtatgggatcctcgcgcgtgaaatacgataccgggaagcccagcgccgcggcgatcgacctggcctcgttttctttgaagacgataaagccgttctgcaacttgctgagtttcgattgggagatgtgcgaacgctcggacaattccctttgggtcatgccttccaggtgccgcgcctgcgcgattctttcggcgtggtattccgtcatggctttcatctcctatcagcgacggagcgatgagggaagcccattctatcgttccgcctgaatctcagtgctctcgttttcgtttgtgtcgtcgaagacgaggttgggtagcaggttgtcgtcgttgtcctcgatcggggtgaagtcctttacctccaccggcctgtcaagcagatccagactgaaatcgtatttcctagccgatcccgagtacgcgtacggcacgacttccaacggccggtatgccgtgaccgaaatggccttatccgtttcctgccacgccagaatcagtctggtgtcgctcaaatccggggatacctcgccatcgggcgcgaacagatcgtcctgcgaaagtctcttgagggccccggcccctttgcaggtctcctgcatgtagtatgcgcgggacgctttggtggcattcgtcttaggcagcttgcccgtcaccggatccacgcggcgcaggatcgcgcgcagcccggacgagccctctcttaggtgaaggtatccgcatttgtcggaaagcacccagctgtcatcgttccagatccttgcgcatcgctggttgatcagacgcggcatattcatattgttctgattgtcccagaacagatccgacggataacgatccaacagatcggcccgtgccgcgttcagcgtttcgtacagcttcggggcgaggtcctgcaatgagtcggtgagggcatgggcctcgtccagcatcttgaactgttccggaggataatacacggccgctcctttttcgcgtcataaattcctaatggaatattttacacccttatgtaacatttcggtatatcggcatttcggtatataccgatggcaaccgcctccgtaaaaaaaacgaaaaacggctaaacgcagccggcagtacaagccgactgcgtttagccacgtgaatgtcgtcagccgacggtcgcgccgtcggtgcctgatggcttcgatggggtcgacggcgtcggctggggcgtcggcgtggagggcgtggagggcatcgatggcgtgggcgtggtggacgcacctcctcttttcgcgaatcacaaccccggatcgcttccgggcaagccggtgccctcgtctgatggcgcgggcacggaccatcccggcgaggctccgaccgtattggcggaggacgacgagcctcccgaagacgggcgtcgtccggttccggaaccggatccggaacttccttgggattgcgattggcttcctcccgaatatgagggcgtttgccgctgtgaagccgattgggattgcgatgcctgcgcctgctgctgcgcggcggcagccgcggctgcttcctgttcggccttggctttcgcctccgcgtcggccttctccttcgccgccttcgattcgttgacctccttcacggccttcgcgatggcgtccgtgtcacgggccttgaccgccttcagcaggatctcccgggtcttgtcgtccgccaccctgccgtccgtctccttgtacagcgcgttcgcgtcgtcgacggtcttgtcgagtttgctgtcggtgacggccttggttgcggtcttgaggtcggtgagacggttcttgagctctttggtcgttctgcgcagcgcctcagtggtcctgtccacgtctgatacggcggcgtcgggcgcgcaggaacccttgattgtggtcgtctttgcgtccaggagccgattcaacgcgtcaagcgtcttgggatccgcgacctggccgcgactggtgtccttcagtagtttggaggctttggccgtggtcctgtccaggtcggactggacggtcttgcgtgtcgcttcggccgagtcacatgcgctgattgcggtctcatgcgcctcttgccgcacggcggcggcgtggcgggttttgatttgcagtcctatccaggacacggcgatgaggctcgcggccatgacgatcgcgacgagcgctttcccgaccgggaagacgcggcgaaccttcagatcgtcgaggtcggccgagtaggtgacggccgccgacagccctcctggtctctcggtcttcccggtttccgtcggttccggttccgatatgggcgggaggctcattgcggttggctccgggtcggcgacctgttcgagtgccgcgaaatcaccatcgacgtccttcagggccttctccgcggaatcgtcgggatgggactgttccgtttccggttcgtgggaagaaccggaaacggaggattgcgaccgggatggctccggttcggcggtccgggtctcatccacagattccatagatgccggcacgggttcctgtcctggttcgtcttccggcggcagtggcgcggatggtatggcgacgcggcggcgacggcgcatggattcgggaggcttcggcgccgctccagccgcgtcgaagccctgcctctgcgcgttgtgccaccagtcgatgagtgccggccatgcgtgcgggtgttcggctatgaggcgcatccacgggcgccagccggggtcgttggccatggcgtgcagctggtcggcagtgagtttggggctgaggatcggctcgcccgtcttcctgtcggtcctgatcatttctcgtcgtccttgtcttcctccggcgccttgtcgccgaggacggtgtacgcgccttcgagcggcccgctgatgccggtgcatttccagcccttgtcggcggtccatcgccatgtgagggtccatggcgattcaaggccggtccagacgctgcacgtcgcggtcgtggaggtgccggcgttcatgccgccggatgcctgtacgtcgggctggtcggcgattcggtcgatggggatgttcaggccctgcgcgtcggatgcgaagtatcgtttgatgagccggtcgcggtcggcggccttggaggtgtatgtggcggcggccttcggggcgagcttctcgcatacctccaatggtttctggtgtcttgcggccggcgtggacgttgacgtctccgccttgacgtcggatgccgcgagcttgttccgattttccgtgccggacggatgcatgaggatgaaggcgatgttcgcgacgaccatgagaacgacggccgcggtcgtggccgcgatgatgaggatgttccttttgcgctcgtccatttccctttccttcctagtgaatgaagctgacgccgccgcccatggccttgaggtcggacgcgctgatcgtctcggtgacgaccgccatccagcctttgccggattggctgatgaggatcgagccgtcggagttgacctgttcgacgaccgcgacatggccgtagtatccgctggagccgtgcacgccgggctcgaagcagatcacgtcgccgggcttcgggctccggccaaccttgtatccgaggcgggctgcggtgtcgttccattggcctccgttgcccatgtgcgcgtcgacgggtttgccgatctggttgcgtcgcatcgcggcccaccaggtgcactggtaggtgtcgtagtcggggaagcgcgtgtagtgcaggcccatggcctcaatgttcacgtgccagctgtcgctcatgacgagtttcgggctcagcgcgccgacggtcggacccgaatcgccggtaccgcccgaggaggtgtacttggtccgggccaggtcgacgatccgtttcacgtagttggtggtctccgtgaagggcggtatgccgccgtatttcaggacgctgccaaggccggcgttgtaggcggcgagggtcagctggagcgtgtcgccggtcagtttcccggacttcttggccgtctcgacctgcgaggcgaggccgcacatgtagttgccctggctccagatcgcgtcgtgcgggttccagatgtcggcctggccgtcgccgtcgccgtccttgcccgcggacgcccatgtggacggtatgaactgtgcgatgccccgtgctccggcggagctgccggcattcggattccaattggactcctggtcgatctgggcggcgatgatgctcggcgtgacgacctggcagatggatccggcgcggatcacgtcggcctcgtattccgcgggcatgcccgcgaccgtggattcgctggcgctggatcccaggaacgcgcccatgacggccaggagcacgccgagcaccgcgagcatggccgcgatgacgggcatgatgggaaggctgatggaggcggctcctgcgatgacgcgggacgcggccatgcgcacgaagttcgcggcggcgcgggcggcgcgcacggaggcctgtccggtggctttcgctccgcgtaccgccttggccggcgcgcggcggtgccgccagatgaatttggccgacgagttgacgcctttcacgcccgcgcgtgccgctttgaaggacaggtcgcgtgtggtgcttcccagcttcgacgcgaagtcgtcgtcggcagtggtgagccttgcgccggcttcgtccatccagcccatgccggtggatcccatccgtttgacgctccggccggcttttccaaggcccgcgcctatgtgcttgccgatccgcttgctcgccttgcctttcgcggcgaacctgccgatcttatcgctgggcttcgcctcggacagcgccttgggtttgccggccgtcttgcgcattcccttgcccgaccgcagggcgcgtttgccgcggttcatgatgcgccgcgccttgccggccgtccagcccacgccgtgcatggtggaggacatgccgtacatgccggcgcgtcccgccatctcggcggcggtgtgacccatggaatcggtgatgtcggtccggtccaagccgaactgcgcggcgctggacaccacgccggtggccgcgcgtccgatgcgggcgcgtgtgcctccggcgtggtgggcttgggttccgctcatgcgtttactttccttcctggaaggtcgtggagtacagacggtagaggtcgccgcccgcggggatgcgaccgtcgaacggcacgtaggcgctgccgatcttcatgagtccctggccgggcagcacgccggtgaagtactggcgctgctcctcgctcagggtcagcagctcgcacagggcgtccgcgtcggtgctgttctggctcaggagcatgaggaaatcgctgttggacagcatctcgcgcgcgtcctggaggtcgaggatctcctcgacgttctgcgtgatgccggtgacgccgagcccgtatttgcgggcacgcttgtagatgtccttgaactgggcggcggcgtactggttggagaagaagcggtggaactcgtcgacgtacagccaggtgcgccgcccgttggccttgttgcggatgacgcggttccacacctggtcgatgacgaccatcatgccgaacgtgcgcagctcgccggacaggccggacacgtcgaacacggtgaaccggttggacaggtccacgttggtctgcccgttgaagccgctcatggagccggtgatgtacgggttgagcgcgtcggcaaggtaccggctcacctggtcgccgcccgcctgcaattcgtcgtgcaggtcctgcaatgtgggctggaccactcccccgccctggttgcggtaacgcgtgtacaggttgctgacgcactggtcgacgagtcccttctggagcgggtcgaggccgtcgatgccgcctatgagcgcgccgatcatggagaccacgttgttggtcttgtccttgacggggtcggaggccgaatcatcctccaggacgatgtccatcgggttgacgcgcgtgccggtgccggcgctgatctggatgatctgtccgccgaacgcggccgcgagggcgaggtattcgcgttccgggtcgatgacgatgacctcgtcgtcacggttgaggaacatgccggcgatctcctgtttgacggtgaaggatttgccgccgccggacgtgccgagcacgaatccgttggagttcatgtggctgcgccggtccgcgaggatcgggttgccgctcctcgcgttgcttccgtagaacaggccgtgcggctcgaacacctcctgcgtggtgaacgggatgaggatggccgcgctgttcgtggtcagggtgcgtttcatgggcagagggttgttgcccagcggcagttcggccgtcagcccctccatctgcatgaacttgaggctctcggccgtgcaggactgcgcgttgaccttggccttcacgttcctgcacgcgacctccagctcctcctggcttgccgcggacactccgatcacgatgatcgagtccacgagcctctggttggtggagcgcagctcgtcgcgcagttggccgagctgttcctgctggtcggcgaggtcgtcgggaaggtcgtcggggtcgaggccctgcttgcggttcgtgcgccgctgatccatgatctgcatcttgacctcggcgttcttgcggcgcacgagcgtcatgctttcgccgcggtccatgggcgcgaggtggatgctcacgtcgacgcgggcgcgcagtccggtcaggtcgttgaccagctggtcggacagttccggcggcaggccggacacccacatggtgcggtgcaggtatttcgagtccagggattcgatgtcgagcatggtcgggtttcgcgcgtcgatgctccacgggcacacgaggtccttggtgtcgggtttgccgggctgatgctcgaaacggcgttcgtcgaaccggaactcctcgccgggccggagcacctcggccatgaggcgcagccggtgctcgcggtcgagccgggtggccttgcatgcgtcgatggagcgcatctggctgacgaggttgttgcacagggcgttcaggctcgcgacggcggcctgctcgtcgctttcgcggacggtgacggtcagggtcttgacggtgctggtgttgcggctgacggattcgagtttgccttgggcgaggcggttgtagtcgagcctgtagtggtcgaggctgtcgccggtctcgtccatcatcacgtcggcgaggatctcccgcacgccgcgtgagcgcgtgtaggaggcgatctgcacgctttgcccggcctcgaagctgttgatgagcttggcccaccggtcgatgatctccatctgatgggattccgggctcagctggtagttgatgtcctggaagaggatggtggcgctccaccgcccgtcgcccaggctggcggtcccgttgcgcagcatcgcgtcgtagccgatgagctgcttgacgcccttcggcagacgcgtcgccttctttctccgcgccttcgccctggcttcggcaccgccttcggccggcgcggccaccggggctttcttctttccgaacattcctcacctttccttgatcgttggtttcgcgccggtgcggtatggtctgcccggaccgtcgagcaggtagacctcgcgctgcgtgtagtggcgcaggatgtatttcaggtatttctcgggcatgaggccctttggcctcacccatccccatatggccacgggcaggccgggcgggaagatcaggtacatggcgaggttggggtccatgcccaacccgagccacaggccgatgtaccctcccccgcacacgacggcgaggatgacggcggcgaggcactgccgccagctcattcccatgaacaccttcgattcgatggtggtcaattccctgtagacgggcatctgcaacgccatgatgattgcttcctttcgtggattgcgttgtgtttcattcgccgccgaagagcttcttggcgacggagttggccgccatgacgacgccgatgagcatgacgctcgccaggagcaggccggtgaagttgcccatcacccagccggagaggctgtcgccgtccttgaacttgctcgggttgagcgtgccgcccacgagcgtgcggtacatgaggatcgccagatacagggtcgcgcactggaacaccagcgacgcgtactgcttgaagtagttgatgccccactggcgggtctcctcctgggcgatgaacgcgatcggcagcgggttgaacgcggtgagcatgtatatctgcacgaaacgcaggaggatgacgacggtgacgacgatggtcgcgcccttggagacgaggaacgggatgagcagcaggatcaggcacggtatctggcccatccagccggcggagtcgatggcgtcgcgcatgctgtcgccaaggccgaggcccgacgacgcgccgctggtgtccaccgacgactggatgccgccgagcacgctgtcgccaatctcgtcgatggcctggagcatgagctcgctgtgctgggccgcggtgaacacgagcgtgagcttgaacatcgccatggcgacgagcttgacgcccagctctcggtcgccgtccgcccgggtgctgaccctggcgagttccaggacgcacatgatcgccagtatcgtgctggctataggtttgaccgccgagagggcgacggtcaggctcagctggtacatgtccgcgttgtattcggcgggggtcttcagcaggtcggccacgaggtcgtcgccgacgccggaccctatcgagttgaggatgccgacgatgaaatcgaccatgcgtggcctcccgtctacagggcgatgttggagaacagggccgcggccgcgatgatcaggccgccgccgacgacctgccagacgcccgactgggtggcggggccgttctggtccttcaggccgcccgccagggtgaccacgccccacacggcccacaggcctccgccgatgatggcgaactggctgaaaagctgcaacgcgctggtgacgacgctgccgctgtctgccgcgatggtgattccgtacatgatgttttcctttcgacttgttttgaatgacatgaccacggtatggccgtcgagaaggctccggtttggacgttcccgacgaacccgaagaggctcggacgatggtatggaaaaggccccgccgaccgttcgccggtggggccttggacgcgtccgggaagggaagggatccgggcgcgcccgtgggcccgtgcggcggatcatggcgaacggtccgccgcgggcccggggtcaggttcgtcggatcactcctccgagccctcggtgtcggccggggccttcgccgcgcgtcggcgggacgcgatcagcaggcccgcgccgccgccgaccgcgacgagcacggccaggacgatcgggacgatgcccgcgccggtgatggcgagcggcttgggacggtagccgttccagtcgtccgggttggagtccaccgtggtgtcctcgcacagggtgcggccggagacggtgacctgcttgaggccttccgccttgccggcgtcgccgtcgacggcctggtcgccctcggtcctgccggactggtcgccgagctggtcggtgacggggcattcgacgagcggggtgccggtgaccttggcgcggtcggtgtggtggccgccctcggtcacgcccttgagggtgccggtcacggtcacggattcgccgggcttgaggaccagggtgtcccagttggccggggtcctgatgtcctcgaccttgcccagtccggcgatggtgccgtcggtgagcttcaggtccttggcctggaaccacgctccctcgccggtcgtcggatcgaccttgctggtgttggtgatcttgaacgcgatctccaacgagtcgccgtccatcttgagcgcctgcttgacgtcgtcgcggtcgccgagcttctcgccggactccgcgtcgtacttctccaggtgcaggctcggggtcatgtcgggcgtgcgggtccacacgacgttggattcgaggtccttgccgttgaagtgctcggtgaaccggttctcgacgcggtcggcggtcttgatgcgcttgcactggatgtacgcgcgccagccgttctcgtgggcggtgtcggccgagacgagcttgcggtaggcctcggtggcctcgacggtcacgacgccctggtcgtccgcggacgcggtgaacaggtcgccgccgaacttcgagccgtcgaagccgctgccggcgagcttcgcgcccttggcggcgatgatctcgccgtcgcggtgcaggtcgcgggtcgcgtacacggcccactggccggtgtactggtcgtgctcgacgtcgagttggtcggtgatggaccaccggtcgacctgcgggtaggcgcggtcggcggggatcacgctggaatcgagcctgtagaggaacgtgcggccctcgtacacgctcttgccgttgacggaatcgccgccgaccttgacggtcacgtccttggccgggttgaccggcttgagcgggttggacacctcgttggtctcggccttcgtgtcgttggtgacctggacggccttgttcctgacggtgtagccgtccgtgaccttgacgaccttgtacggcatgacgacctggtattcctggccgagcagcgtctggtcgatggccggctcgttgagcgggtcgtgcccgctcgcggaggcgtaggcggcgaggtcctcgggctgcgggtcgcccgggatggtcctgccggtcttcggcacgaacgtgtccacggtcttcgcgtacacgtaggcgacgccgtcgcggacctggacgttgaacctgccggtcacgtcctcgccggactggtcgagcacctcgatgtcggacgggaggatgctcacgtactgctcgtcgtagtcgtcggtgatgccggcgcgccacacgcggtacgcgttgtccttctgcttcaggtcgagcgtgaccgtgtagttgccggtgtcgccgagcagcatggtcttgccgtcgatggtgacggtcgggtcgccctgcgcggaggactgggtgtccttcttgctcgggtcgtgcttgggcgggttgttctccacgatgttggacggggtgacgctgccgttcagggtcagcgcccactggttgccgaccttcacggtcgtgggcgcgtcctcgctcacggtgccctcgaagcggacctggacctgcgggtgcgagcccttcgtccagtgttcctgcacgtacttgtcggagtaggcgatggtgagctcgtggctcgcgtcgtcccatacggccgtgtagtcgccctcgacgcccatctgggggtcggcggtgacgagcggggtgccggtggcgaggtcggtgatctcgagggtctgcttgtccgggatcaggtactggtcgtacgtgtcggtgtcacggacgtgcacgacgtcgtaggccaggtcggccggcagctgcggcttcgtggtcaggcggtattcgaccctttggcccgggtacacgaccttgtcgttcgcgtcctggttcgcgccgccctggctgccttcggctatgaccttcttcttgaccggcggcacgtagccgcagatgtacggctcgttggtcggctgggtctcgtcgttgaccttctcgctgcccgagttggccagcttggagccgtcggggttctcgcagaacgtgagctcgtcgcccgcggccttgttgaagtccttgcggacctgggccgcgcccttgccgtccgcgaagtccacggtgccgggcaggaacagggtgatctgcttcgggttcttcaggccgacctgctccgcgaggtagtcggcgtgcgccttggcggtgaccctggtgccgttgacggtgatgtcgaagcggtcggtcacgtcgcggccggtgttgatgatgtccgcgacgctggacttcgcgtcggtggccgcgtcggcctcgtacacgcggatccggctcctgtcgccggtcaggtcgaacaggtagtcggccttggcgtaatcgtcggtcagggtgatgtcgttgaccttggcgaggtcgttggcgatggtgccgttgacgacgctgccgacctggtcgccgtcgaggaacttcatggtgtccgcgccggtcttgttggattcggacgggtcgatgacggcctcccatttgccgttctcgaggcggatccagctcttgtccgggttcgggctccattccttgacgggcggctcgttggacgggatctcctggtcgttccacttctcccagccgccgttggtcatggtgaccttctcgccggccttgagcacgcccttgaggtacgcgccctcgacggtcatgcgcacggcgcggtcggcggcggtgttgtaggtcgtgtcgagcagggacttcttggcgctggcccacaccttcgtgccttccttgtggatgtcgaaccggtcggtggagtccttgccgtcgatggtgacctcgacgctggccttgtccaggtcgatgtacttggccgccttggcgaagtcgtcgccgatctcgtaggaggtcatcttcctggcgaggttccccgggagcttgccgttgacggtcacggcgaacgtgtcgcgctgcacgaacgtcttcgtgtcgtcggacgccttgttggtccatgcggggtcggacgactgcgcggccttggcggcgtcgacgctccacaccttgtcgggcttggggttgcgcacccagacgggcggttcgttcgtgccggtggtctcgttgttccacgtctcggacgccttgttggtcagtttcctctggtcggccgcccagtcggcgttcggggccttcctgacgatgccgccgatgtacagcttgaccttgcggccggcggtgcccagcgcggtcctggtgaggaagacgctcttcgcggtcgcggtggtcgtgtgcttcgcggtgtcgatggcgatgtcgaagttcgcggtctcgtcctcgccgtccacgtacacgcgcacctggtccttgtggccccagtcgatccactggctgctggcggtccagtcgtcctggatgctgtagctggtgaacgggttcaggagatgggcggggatgcgtccgttgacgacggcgccgatcgcgtcgccggtcacgaacgtgcggttgtcgctgcccttgtcgttggtgcgctgcgggtcgtcggccttcagcgccccgtcggggtcgagcacccacaccttgtcgggcttcggggtgaccttgccgacctgttcgctgttgccggtctggcagtccttgccgtcgccctgccagcatgccctcgaatcgtcggggatgtcgtagtcgacgccggtgggcttggccgcctggggcacgttgagcgtgtaccagccggacgcgggcctgacgacgtgcgccttgacgatgcgcttgcccgtctggccgtcatcgatcgagatctcggcctggacggtcttgccgtcctcgtcggtcacggtgatcttggacgggtcgtccgtttcggtgccgccgatcacgacctgctgcgagctcacgtcgatggtgtcgtacagccagaaatgctcggaggcggagctgtgcgccttgacgtgcgcggtgtagaggctgccggacgcgatctgaccgttcggggccgtgacctgcccgccggccgcgtcggtcagcgtcttggagggcggcgggagctgcggcgcggaccactgctcgttcgcgtccttgtcgccgttcagggccacggcgttcttcatcctgccctgcttggcgaagctcacgtcgaacgcgaacctgccggccggccagctcttccaggaggcgtccatgtccttgtaggagaaggacacgtcctggctcgcctggttgcctatggtgaactgcttgctggccttgcggatggtgccgtcgacgcctgtccagcgcagggtgctggtgccggtcaggttctcgctgatcgggctgccgttgcggctggtggtgatcgtgtcggccacattgcgcgtgtcgccggccttggtggtggtgccgttcgccttggtggacacgcccaggtcgtagttcacgggcggttcggcctggttgagcacgatcgcgatgaccgcgaccggcgccttgttcatctcacgggacgccaatgcattaatggtcgtcgtaccgtcgttgaaatggtcggaggtgcggtatccgacgccctggtaggtgtaggtgttgttcgggatgccggacgaattgtaggcggccttccacacgtcggcgttgaaggtgccgttggcgccggtgtagtagtcgccagcgctgccgggcgtgtggacgaagccgaggccgacgagacggcactgggcgctgctcaatccgtcggccttggagcggtccgcgcattccgtgttcgcctggttcagcgcctggtcgatcgcctggttggactgcgcgccgccgaggttcctcacgccgatgctggccatcgcggcgacggcgttctcgcgggtgggcgcgccccaggagtccttgtagacccagctgaccttgccggtgccgatgccggtgccgccgccggagccggacccggatcccgcgccgccctcgccggcgtacgccacgcacggggagagcagcgtcgccgcggcgacgatgccggcgaccaggggcctgagcccgcggcgcttcttgtcgttcttttcggaaaccaatgttccctctcctttcagggattcctgtcttgcgggtcgccccggcggtgccgccggggcgggacgtggggaacgcgtgttcccccggtccgccgtggggcgggcccgtccggatgttccacgcgggcgggcgccgataacatgcgatatcgggcgcgtccggtgcacgcacaccatggaaccaccgtccggggggcgtcggtttggacatccgccgggggtgggaagggccccgcgacggatgccgaggggccctgaaagaggagaggggatgggagggaatcagccgatggggcagaagcctccggaagcgcatgattcgtttgtagtgactcggtcttcccagtcgtagtgggtgcttccggtggagcccgaggaagatgccccgggcgagccgccactcggtgtggacgtgtcgccggaataaccgttgccggtgtagccggtgtggcctgaaccggacgagggccatgactgccgcgcctgcgccttctgcgcggcggccgccgcggcctcctgttcggccctggccttcgcctccgcgtcggccttctccttcgccgccttcgattcgttgacctccttcacggccttcgcgatggcgtccgcgtcgcgttttctgatggcgtccatcaggcttgcgcgggtcttgtcgtccgccaccctgccgtccgtctccttgtacagcgtgttcgcgtcgtccacggtcttgtcgagtttggacgtttcgaccgcgttcaccagcccgttcagggacttcgtgtgggccttgtaccatgatgcgttcgcggtgacgcccttcgtggcatcctgcacgccgggcctcgaatccgctttgcaggacacggtcttcggcgtgggcgccttcatggccttggacaggacgtcaagggtcttcgcgtccttcacgcttttcacgtcggtcttcgccatgctggcggccttgccgttcaatagcgcgtcgtacgcggtcgtcgcgacgcggagacgttcgctctcggccgcgcagtccgccctggcctcggccatgaggcggtcctcgtgcgtcctccaggcgatgcctcccgccgcaagcagcgcgagtgcggcgacggtgatgacgacgatccttccgcgatgcggctttttcttttccgcgggctcgatcggaagttcgatggtctcgtcttcgatggccttttctttctctgtcatttgttctccttgtccataggttcacagcttattccaggcccaggtacgtttcgagggcggcatcgaccacttcctggatgcgcatgtcatgctcggcggcccaggccttgagccggcgtcgggtcgaggcgcgaaggctcacgctggtcttcacccagccctccgcgtcgttcggtttcacggccctccggtttttcggtatctcggtatccaccgattccggtcttccggtatccatcctcacgcgtctaagtgttgtcgttatggatgttgcaacgcttagacgcgtgaggcctgttccgtttgatgccgttcttcaccggtttcggtttttcaatatttcggtatttcggttttgtgggtatgcctatccggcctggttccgttcccttccgtcgtcttcgagctcctccagtcttctccggagtccggcgacggtctgccgcagctggtcgatttcctcctccttccgggctatctgcgccttgatgccggccggctcctcggcggggaggtattcgagcgccagtcgttcggcgacgtcgcgcctgtgtctcggcaccacgcgttggtagcatcggacggccacgtcgacgtccacatggccgagctcgtccatggtctcgcgcagcgtgccgccctggatcatgaacatcgtcgcgtgcgtcgcgcgcagggagtggaacgtcacgtcctcgcggttgattcttttcctcgcggtgcggaactgccgttggatcgtcgtcgggttcaggacccgttccgggtgcctgatcgcgtggaagagcatcgtgtcgggatccctgtcgggacagaacctgtcgatatgttccctgatgagacggcagaccggtgcggggatgggtacgactcggtggctttccggggtcttcgtctcgtcgagccggtattcgcccagatcgtccggaccctgcgtcacggagtgccgcacgtacagcagcctgtggtcgaggtcgatgtccctgagttgcagtccgcagacctctccgatgcgcagcccgcccaccagcagcgcgagatggatcgacaggcggtagtattccgggaagccctcgaccagcgtgtcgatctcctgtttggtcatcggcgcctgctcgcgtcttttggacggtctcttcctcgtgacgaggttgcatggattcgagggcagcagcggcggacctccgtccggttgccgctcggtcgcggccctcatcacgcgcttgagcagccagaccgcgtgctcaagcgcggagggacgcacctcgtcgcacgccttcgcataccattcgttgacgaattcctccgtgatgtcgcacatgggcgtctcgccgaaccagggaagcagtttgtccaacgccgccttctggatccgcttgcttctgccgctcagctccgatccgtccttcttccgcaggtcggcgacgaaacgcgtcgcgtatgaggagaacaggaccctgccgtgcatcgtcctcgccgacgggtgcgtccacctgcggattccctttttatggtcgatgacgagcgcgtgctcctcgtcgagccagcggtacgcctcggtctggaattccaatccgaaccggcggtagatcctttgcctgggattgacgggactctggtatcgggcctgccaggagacgatccttccgtctgcgtctttgcaggcgacgacgcatccccattttcgtcttttcctgtctccgttggacatcggttgttttgtctttctctacttcttgaaaaaccattagaagaaagagtaattgcctacgccggtgattttgaataaggtgccaccctgcggcctcggggattctatttttcgggaaaatcgggattgttcagagtggttttgattggaatctcaacgatcttcagtgacctgtttcctggtgtcgcatcccagagaagaagcatcatgcgcatgtcaccttcagaggtgcgcatgatgatggtagtcatggtcccaagtgtctcatgggcttgagaccgggcggtgatgccaatcaagcggaatgtatgtgagtggcttgtgacgtgtgtttatattgcatataatttacataattattatgtaacctattgaggggatgggaggctgctatggctgtgaaggaacggacgaccattgcattggatccggaggtcaagcgcgaggcgacggacgtgcttgagcggatgggtttgagcttgagctcgttcacggagatctgcctgcggcaggcggtccgtgacaagggcatgccgttcacgccgagtctgaggccggtccgatccgacgggtatccggttcctccgactcacgacgcgtatcgtttcgagcgttcgaagagcacgggcaatatcgtgctgcctcaggagtgggacgatccggcggatgacatctacgatcatgcgtgagccggaagtgtacgacgtgtggctgatgcgcgtcgagttccccgatcatcccggcgtgggcaaggtcagacccgtcatcgtcaccagggtcgaggaggatcgggtctcaggcatcgtcgtcaaggtgaccagcgtgacgacatggaacggtccgggtgacgttccgttgctcgactggcgtcaggagggtctatacaagccatccgtggcgagatgctcgcagcgtttctggttcggcaatggtgacttgctgaagtatttcggcaggctgtcgttgcgtgacgcgaacgaccttgatgccggtcttgatgctacgggcgacgtcccgccccaccgccagtcgcattcatgatgatggcggggccaacggtttttctccctggatattatctgcatgtcgatgtttgtgttcgatgaacgaaatggattgttggttgtcggcgtattctgcgcaacgcgttttccgacggtgtcgtcacgggcgtgatgccgcgcaatgcgaggatggtgggtgattttggggactggcgaagatgccaggctccggcggggacggtggagtgctcccggattattttcgggtgcctgtaggcgcctcgtggagaacgaggctgatcggtaggtttcccgaaatcggaaaaccttggaatagagccgaaaacgaccacgtgcgattatcatgcgaggtgcgcatgatgatggcagtcatggtcccaagtgtctcatgggcttgagaccgggcattgctgtttgattgcggggaatggcgcagcgggcccgtggactggccacggccggtagccgggccgccgagctgcaacgtggaacgtcatacgaattggttcactatgatcagcgcaccggcagcgacagccatgagtggctcctgctctgtattttgatgctcctatacattgtcaagcgtttggaaccgttgtttgagttcgggcaggttccatgctccgcgttcgacttcgttgatgcggcttgacggcacggtcggcgcctcgccgacctgctgttgaagaaggagcttgtgtaactggaaccgctacaccacgatcgagcgactgaggcgcgacctcaacgactacgtgtggtaattcgacgaccagcggctccgttccatcctcggataccgggcccgaaggaattcgtcgaacgaggatcgtcctctaaggacctatccaacacgctgtcgccaatccgattggcgtcatggagttataatttttctgtgatttaggtatgtaatgtagccctaatcataagttgtgaacgtcttactcgcgtatgttcgtagacactgaaagtcaacggacatacttatcccagttcctacgtgaaccaactcccggggagatcaacatgactcgattccgcaatacatacacaaccctcacaaccttcgtgtcggccgctgttctccttatctcgaccactgtgccggcatccgcatcgcccatggcaagtgatccattgtcttcgtccaccacaacagccgtgcgtgcacaggtaacagcccttggtgcaaatcgtacctacacttacgttccgaccaataacacaagcgtcggcgaccccatcgtcacagcctactggactccagaacgcatgaagagtgccattcccactgatacaccaacaagcacgaccgaggtaaaccgacagattgacgagctcgaacaaccggctctggcagacgaaccagttactgacggatcgtcccccgtgacggcaatcttgaacgcaatcacgccacaggctgtgacgccagtcacgaatttctcaaagaccaacggaaaagttttcttccgcaatcagaccgacggcaaggattacgtatgctctggagcctccgtcaatagccgttccaaacgtctggtcgttactgctggccactgtgtccatggcggcccaggaaaagattggcataccaattggatattcgcaccgggttacagcaacggtgccacgtatggcacttaccaagctgccacgctccgaacgctcaataactggatcaactatggtgaatccgggcgaggattcaattcagacgttgcctttgttaccacctatagtggcagcacttccggggatactgttgtaaacgcggttggtggtcacgggtttaggtggggcggaggtactggtttcgacgtcagtattttcggctatccaacgaacctcagcggaggccaaagcatgtgggcctgctggggctctagtcaaactggttggaatggcctttacaagttcaaccatattactggttgcgatttcggcggtggttcgtccggtggaccttggctcgacgaatacagcaataccactggtctcggatatgtacgcagcgtaacctcgaacggccccgcagacaattcctatcttcgaggcccatacttcgacagccgcgtcaacgacttgttcgttgcagcaaacaaggactggtgaaacaacatcatggccagttggattcgcttccgcagccgttttgttgctgcgcttctggtatttgctttgaccagtatcacggtaatgggatgcgcaactaacgggagcgaatccagccccagctcaccaggtacagatgcaggatacgattccgcagcagaggcaccggagcaatcctccaacgacgtacagcaacgaaccgacctcagcaacgaacatatatcctcatggaaccgatacgaagtggtctcggacacctccgtgcgcattttcttctccatgggaaatcccaaatgtcatggtgtacgggccaccgtcgacgaagactcctccgcagtgctaatcaccctctacgaaggaacactccccaacgcaccaaccgaatgcgccgagatcgcagtcaatgcatcccttctgcttaccacacgcaatcccatcggaacccgttccgtaattaccggataaaaatagtccagacctttggaactaaacacataattccaccggcgtcgccatacacatgcttgggaccggtaaactagtgcagcccaaacaaccacgtagatcgttcgggcattaatcgaaatcaaacaacggtatgtcgccgccgaaccgtccgtgatcctcgcggtttctttcatcgaaccggcgtgccggacaccatccacgaacggccacgtcgagcagatggttctgcgcgacggagacattgaaggcctcgtgcccggcgtgcctgttgtccgacacggagacgtactgctgggcgaatgcttttgggcatcgcccatgctgaacatcatgaaatcacaaggcggatcgttctttttccgtgccggtcggcgaagacgttgagcgccggcaggacggtggaatgtcaccggattgttctcgcgtgcctgtagatgcctcggcgaaaacgaggctgatcggcaggcctcccaaaaaacgaaaaccttggaataaagccgaaaacgaccacgtgcgattatcatgcgaggcacgtatgatgatcgtactcatagcggtcaagtcctgcagaacgccccgacgcggccggccgcatcgccgcgcccgtaagcggggcacgtcaccgtcagcgcgcgtacaccgtgggagagccgctcagacgcgacatcgccgactgggggatgtcatggacacgccccagaacggcgtccaacgtcgacgagacggcatgcggcgcccggcgatcgctgcaatccgtccaggagggtcgttccatcggggacgtcatggccgtccgaccatccgcgccggcctccatgtcatactcccggcgaccgtatcgccagagagtcgcattgctgttgcgaaccacccgcgccaaagccgggcgacgtctacgctgaaggaagaacatgcctgcctcgatcccgtatgggcgccgtacctctgatgtccggcgccggtcgatattcatcgtgccaccatcggcgatcccgccaatcgatgacactatcgattacacaccggatcgtgccgtcatgccctcgtccgaaagggtgattttccgcacgcccgtcatccccggggccgtccggccttgcaaaggtcacgcggaaccggcagcgcgacgggcggaagacttggacgatcgctggaacgaacccggctactgcatcttgcgcaggcgtggcacggcggaatccttcgcgccggtgacgcggtacacgtcgaacacgccgtcgatcttgcgcacggcagcgagcagacggttcagatgctgcgggtcggccatctcgaagctgaactggctgatcgccacgcgatcggagccggtcgcctgggagccggacaggatgttcacgccgtggtcggccagcacgcgggtcacatcggacagcagatgctggcggtccagcgcctcgacctgaatcctgaccatgaacaggcccttggtgctggtccatgccacatccacgacgcgctcgggctgacggcgctgcaggtcgatcatgttctgacagtcggcgcggtgcaccgacacgccctgattgcgcgtgatgaagccgacgatcctgtcgccgggaaccggcatgcagcagcgcgccagcttgacccacacatcgtctacgcccttgacggacacgccgagggagccggtcttcttcttggcgttctcgaccgcgcgcagcggcagcgcctcctgctcaacctcctcatcgacctcgtcgctgcccgcgtccttgaccagatgcgcgatgacgttctgcgtggagatctgcccgtcgccgatcgccgcgaacacggcgtcggggttggggaaattcagctcgtcggcgacgccgaccagcgcctgggtggtcagcagcgtgccgatcggcaggttacgcttgcgcatcgcgcgggtcagctcgtcgcggccctcctcgatggcctcggtgcggcgctccttggagaaccactggcggatcttgttgcgggccttggggctcttgacgaagctcagccagtcgcgggaggggccggcgttgtcggatttcgaggtcagcacctcgacggtgtcgccgttctcaagcttggtgtcgagcggcaccagacggccgttgacgcgcgcgcccatcgtcctgtgcccgacttcggtgtgcacggcgtaggcgaagtccaccggcgtggcattggccggcagcgagacgatcttgcccttcggggtgaacacgtagacctcggccgcgcccagatcctccttgagcgagccaaggaactcgttcgagtccggggtctcgctggtccaatcggcgagctgctggatccatttgaggttgtcggtctcgctcagctcctggttgtcgtcggaaccgcgcttgagatcggatttgtcgggcgcgctcagggcgcggccggcctgcccgttctccttgtacttccagtgcgcggcgatgccgaattccgcgcgccggtgcatgtcccaggtgcggatctggatctcgaccggcttgccgcccggccccacgaccgtcgtgtgcaacgactggtacatgttgagcttgggcatggcgatgtaatccttgaagcgcccgggcacggggctccaacgcgcgtgcacggcgccgagcgccgcatagcagtcgcgaatcgtgtcgacgatgatgcgcacgccgaccagatcgtagatgttggcgaaatcatggccccgcacgatcatcttctgatagatcgagaagtagtccttcgggcggccggtcacgtacgccttgatgtgctgcgcgtcaagatcctcgttgatctcggcgaggatctgcgcgagatacacgtcgcgctggccggcacgccgcgcgaccagcaccacgatctcgttgtagatcttcgggtacagcaccttgaagctcagttcctcaagctcggtcttgatggcgttcataccgagcctgttggcgagcggcgcgtacacgtcaagggtttcgcgcgccttcttctgggcgctggacgacttgacgtaccgccatgtgcgggcattgtggacacggtcggacaacttgacgacgagcacgcgcacgtcgcggctcatcgcgacgaccatcttgcggatggtctcggcctgagcggaatcgccgtattccatcttggagagcttggtgacaccgtccaccagaccggtcaccgtgtcgccgaattccgcgcggcactcgtccagcgtgtagtcggtgtcctcgacggtgtcgtgcagcagaccggcggcgaccaccagcggccccatgcccaggtcggcgagaatctgcgccaccgcaagcgggtggatgatgtacggctcgccggatttgcggcgctgtgaggaatgctggatgaccgcccgacgataggcacgctccagaatgctcagatcctcgtcggggtgatggttcctgcacgcttgcatgatcggcagcagcgggttcagcgggtcgtcgctgatctcgcagccgagcatgcgggcggcattatgctcggcttcatcgttggccatgtctgcctccctctcaggtatttggtatcacatcctacccgccgcgaatgaaaaagcatacgcggcatcttccgccgtgaacggtctcccgcatgccttggcttgcgggccgtgacggccgtgttcgcaccgtcggccaggatcgtccgtcaggatgacacgccggtggagccgaaaccgcggtccgcacggtcggaacccggcagggtgctcgccgggacgaacttcgcctcaacgtaacgctggatgaccagctgcgcgatgcggtctccgcgatggaactccatcgtatgctccggatcgaggttgatcagagggaccttcacttcgccgcggtacccggcgtcgatggtgccgggcgcgttcagcacggtcacgccgtacttgacggcgagtccggacctcggatgcaccagcgccacgtatccggcgggcagggcgatcgccatgccggtcggcaccagggcgcgctggaacggcttgagcgtcacgtcctcggcggcgaccaggtcggcgcccgcgtctccggcgtgggcgtaccgcagctcgaccggatggccgggatcaagcgatttgaccaggacctcggtgtattcgggctcgtcatatgtctcgtcgaacgccatcaggccgcgcattcctcgcacaccggctggccgtcgtcggtgacgtatgccagctggctgcgatgtttgaccaggaagcactccgagcagatgaactcgtcgttctgcatggggatgacggtcacggaggcgtcctcgttgctcagatcggcaccgggcagttcgtaatcctcggcgatggcgttctcgtcgtcgtccatatcggttgaagagctgcgcgagcccttgcccaactcctgcagcgattcctcatcctcgtccttattgcggggggaatcataatcctgagccatctgaatcctttcatcatggtggcacgttctgcgccatagaatacatgacttttactcggcataggatacacgatttgaaatactcgtaaaatacgacacgtggggcacaatagaagaagttgtaattttctgaggaaagtggtgtgaacatgcctgagaacccgctcacacaagcccggttcgaccacgtcgacgacacgggtcgtctcgtgttcgcgtcaggcgacgagcgtttcttcgtcgatgtggacgaaacgctggaacgcgccattctggaagcgaagcagatccgcgaggagtcccggtcggctcccagcgcatccagctcggctacgctaccgatctcgcagattcaggcgcttatccgggccggcgcggatcccgcgcgggtggcggaacgataccgtctcagcgaggcgctggtgcggcgtttctcgtccgccgtcgaggtcgagaagcagtacgccatcgagcagttcctcaccgtgccggcccccaaggagagccgtgggcggaccaccgccgacgtggtggagcgcgcgctggcgctgtccggcatcggcatggagtcggtgacgtggaaggcgacacgccggggactcgaaccgtggaagatcgccgcgacgttcgacgccgcggggcgcaccgccagggcggaatggtcctggaacatgcacgacaacgcggtggcatgcctgaactccacggcgaagaagctgctgggaacggcgacgggcgcgcgcggcgacgggaccgagggcacgccctccgagatgctgcccgcgacgctgcccggggattcggtacgctcggcgaggatagagcgcaccgtgtcggcgtggaacacccctgccccgacactgcctgcggctcgccccgaagcgcggatgccacgttcggcgtccccgttggacgtgcgcaccgagcctgcgccatccgaggaaggcccctcaatcgacatcccgcgcaccggcgcgcttccggcgaaggccggcgaggccgcgctcggcgccgccgagtcgaaactgctgcggccgacaccggattcggacgcgtccgcttccgcggctcagacggcgcccgagatcgaatccgaatccggcaagacgtctgccgaacgctccgaccggcagacgccgcctgcgaaacgccgttcgggtcgctccgccgtgcccagctgggacgagattctcttcggcgagtaggatcgtctggcccgccgacgctgtccagcgagacacgtcaatccttttttacggaaaaacgcgacaggccgtccagataatgagacatcggcgtgacacgttcggcatcgaaacggtcacgccacgtcaatcaggcagggaatgtccatttccagcgccgtctgcgagccatgcacacccggcagacgcgtcgccttgtcggtctggatgcgcgaatccacgaaggtcgccctcccggccgccgataccagcacgtcaccgagcatcggcctgacacgcggctcgacgacaccgaacatgccctgatcgatcgcctcatcccgggtacgcaccagggcggcgtcacccagccgatcgcgccatcgacgcgcgatgtcattcgggtcgcaatccggctcggcatacagcatcagagacctgggctccccgccgaccagggccacgccccgggcgagctcgggattctcggcgacatcgacgcgctggtccggatccgaaccgaccatgccatgatcagccacgatgacgatgagcgtgcccctcggcgcaagcctgtgcaattgcgccagctgttcgtcaacccgctcgaacacggccgtccactgctcggactcccagccgtaggcgtgccccaccttgtcggcgtcgcggatgtacaggtacgtcagccccggcgtcttcgaggcctcgcacgcggctctcacgcggccgagcggccgcatatcgcccttgtagtccgcaccgcgcaacgcggccttcgtcagcggggagtcggcgaacttcggcagtccgcagctggtgacccgcacgccggcggcccgcagggtctcgaacaccgtgggctccctctgcaggtccagaggcgcgatcgcgttgtcgaactggatcagctgcgacagctcccccgtttgggtgttgcgctgcgtgtagcccgccatccccgtcaggcccgggcacgtgccggtgccgaaagccgccatcgcggcgacggtggtgctcggcgcgcatgtggcgatgggcctgtcgttggactcgtcgcgcagcaatgcgcgcagatacggactgtgtccgacgcgcatccgaaggttccagtaaccaaggccgtcaaccagcgccacgatcacactgtcggccttgggaacccccagggcgacgcgcaaggcctccggatcatggtggatccgcgtggcgaccggatgccctatcgccgcgctgaccgccggcagcacggcggacaggtgcagcgccccgccgcgtacggcgtcgcgccgccagtcgccataccgaacggtcggtatcgtctgcagcaattcgtccatgctcgcgatttcagcgttcatgttttccattcaagcaccgtccgtcggaaaaggacacggctgggcgggattcttggcatgattgttcgctatcatggacgattggatttttcaacggcaccatttcggccattcgcgccatgcggatggccgaagcacagattggggaatggcacctatggcacatcgcaccacgactcatcaggcctatgacccgcgtcaggtccaagagcatatcgtggaaacgccgttgaacgaggaaatgagcaagtcgttcctcgaatacgcgtattcggtgatctacgcgcgagccctgcctgacgcgcgcgacggcctcaagcccgtgcagcgccgcatcatctaccagatgggcgagatgaacctgacgcccgaccgcccgtacatgaaatcggcccgcgtggtgggcgaggtgatgggcaagctccacccccacggcgattcggccatctacgaggcgatggtgcgtctcgcgcagccgttcgcaatgcgtctcgcgctggtggacggccatggcaatttcggctcgctggacgacggcccggccgcctcccgatacaccgaggcccgtctggcgcccgcggcgctgggcatgaacgccgacatcgacgaggacaccgtcgatttcacgccgaactacgacaacaagctcaaggagccgaccgtgctgccggccgcgatccccaacctgctggtcaacggcggttcgggcatcgctgtcggcatggccacgaacatggcgacccacaatctcggcgaggtcgtcgcggccgcgaagcacctgatggcgcatcccgacgccacgctggaggagctcatgcgctacgtgccgggccccgattggccgggtggcggcatcatcatcgggcgaaacggcatccgcgaagcgtacgagaccggccgcggcacactcaccacgcggtcgatgacgcatttcgagaacgtgacggcgcgcaagaaggccatcgtggtcaccgagctgccgttcatggtcggccccgaacgggtgctggaacgcatttccgaaggggtgaagaaccgcaagctggagggaatctccggtgccatcgacctgaccgaccgccataacggcaccaggctggtcatcgagatcaagaccggtttcgacccgaacgccgtgctcgcgcagctgttccgacacacgccgctgcaggacaatttcacgatgaacaacgtcgcgctggtggatggccggccccacaccatgggtctcaaggagatgctgcaggtgtggatcgaccaccgccgcatcgtggtgcgccgtcgcagcgaattccgccgccggaaggcgcttgagcgcctgcacctggtcgagggcctgctgctggccatgatcgacatcgacgaggtcatccaggtcatccgcacctcggatgacgccgacgccgcgaagtcgcggctgatcgcggtcttcgaccttgacgacgtgcaggcgcagtacatccttgacctgcgccttcgccggctcacacgcatgagccgcatcgagctggaggcggagcgcgacgacctcaagcggcgtatcgaggagctggagcgcatactggcctccgcgcaggaactggaccgcgtggtcgtcgacgaaatggatcaggcggttgctgaatacgggacgcctcgccgtaccgtgctgctggacgaggccgaggacggcacgctgacgccggtgacccctcatggagacgacagcgtgaacgcggccgcgatgaaggccgccgcagccgcggccaccctgtcgtcggccgaagcggacgtggccgccgcggccgcagcaaggaaggccggcgaggatgccgcggcagtcgcggcgctgcaaatcgacgacgagccgtgcacggtgatgctcggcgcgtccggcacgatagcgcgctccaccccggccgcattggatgcctgggagtcgcggtcgacgagcgacgaacgcacgaaggacgaccacatcgtgtccatcttccgcaccaccacacggtcctcgtacgggctggtcacgtccgccgggcgtctggtgctggcccatgtggtcgaattgcccgcgctcgccgcatcgccgcagacgaacgtcgccggcggcataccggccgacgagctgatcggcatgaccgaaagcaccgatccgattcccggcgagcatgtcgtcgccgccatccccatggatcagcgcgacgacgacggcccgacccccgctcccctggccatcggcacacgggccggcgtggtgaaacgctggaaccgcgaggcccccaccacgatggactcctggagtgtcatcgacctcaaggacggcgactccgtgctgttcgccgccgacgcggcggacgaagaccgcctcgtgttcatcgcgtccgactcctcgctgctgacgttcgatgccgggaacgtgcgcccgcagggtcgcaccgccggcggcatggcgggaatccgtctggctgagggatgcacggcgatcacgttcaacgtggtgcccgcaggcaagatcgcgtggacgtacgaagagggcgacaacggcatgttctccgcgtccggagccgtcgtgctgacggtcgccggagacaaggacgcgctgcccggcaccgaaaacggtgcggccaaggtgacgccgttggagatgtacccgaccaagggccgcggcaccggcggagtgaggtcgcagcgtttcctcaagggccagaacaccctgatcttcgcccgcgtcggcatgtacccgctgcacgcctccaccgagggaggctcgccggtggagctgcccaagcccgacatgcgccgcgacgcatccggtgttgatctggccgcgcctgtcgccttctgtggatgaggctgtttcggggccggtgccttcagcgagcatcgcccccccctcacacacctgtggggcgtaggggggggggtgccgtccacgtttcggcagacgcgcagttcctgcaggcgcgcaatatcagatggcacgccgtgtcggatgatgcgcaatgccggatggcgtacctcacgcgtagatacgccggtgacctggcgctggcggcggaacatatcggagaccggcggcggctgtcagcagtagagcctcatgccttggggtacggggacgaatcccgcgacgtgcagcatgcgcgaccactcgcctcgcacagtcaatggctcgtcgttggcatcacagaaggtgacacccccgcgaatacccccgtcacgcaggtttcgctgcaatgcgtaggcgagctcgttgcaggcctgctgcaatgcgggatccgcgtcttgcgcgagcaacagatgatggcttcggggcaccgcgtatgccagcaatcgtccaccccggagcacgaccgatgcgccggagcgccgcgccggcctgatcgaaaacccgcctatcgttcgtggccatgcgatgacgcttccgtacaggttggcggggtcggtggcgtccaacacgaccgcggagggttccgccgcgcatgcccgcagcgcatccacggtctgacgcgacgcgaactgtgcggcaccgcatccgctgacgaacatgccgcgcatcaatgcgccatgctcttccatgcgtctgagcaccggatacaggcccgagaatccgccgtccagacgttccttgtcgatcatgggcggagctatgacgccgtaacggtccagcaacgcctcaatccgcgcgatggcgacccgctccgcggacgcctcctgcatatctgcatgaggcacggcggaccatagtcccgtcatgttcgccgggacactgaccctgacccgcaccctgcgccgtgatgcacgggctggggccttcaccgcatgggatgacgctccgagggatctcagcggatcgaacgagctgttggtgaccttcccttgccagaccagcgaccatagggcctcctcgaactgggagtcggaccatgggtggggcaatatctcgccggtggattcgtccacgcattccgacgacgcgtcccatgccgcgcgcgtcagccctgcgagctgattcgcatgatatgccccgcccggtgccagcacggccatcaccgcatccggcagcgtgaccggctccccgggggcttcgccgttcttctccccatcctgcactgtcagaagcagggagtccgccggatgcaatgcgacgagtcctggttccttcgccttgctgccggtggtcttggaacccacccagacgatctcgccggaggagagcaggccgtcgagcatcgccggacgatagtcgcgcacccgtaccggcaatacggacgattcccataccgagggaggcagggcgacgccttccagctgctcgatgacacgcatcaccccgtcttcgccgtcatatcgttcgccgcccaccggcccgacaccttgcaccccgataaggaatgtctggtattcgctcaattcgacgggcttggtctcggctcgggccttggccagcgacttggcccggatgcgtcggaacacctccttgtgcagccatgcctttcctccgtcctcggcggcgatgccgtcaaggacctctcctcgtgctttgagcatgtccaaggcgtgcaccgcgccggccgcgtcgatcgacaggtccgccatcatccgttcgacggtgaaaggcccgtgcgtcttggcgtatcttgcgacccggccatcgatgtcatcgtccggcagctcgttccagaacgtcctgcgccccagctcctcctcgacctcatgcacggctcgaggatccatgatcgccgagaaatcggcctgccccagcagccgttccagcacatcgggatcgatcgacagcagttgcgccgatcgttccgcctgaggcacgtcgtactggtacatgacggtgcccacatagccgaacagcaggttctcggcgaatggggacgcaatgtcggtcgtcacatcgaccagaccgatgtttcccgactgaatgtccgtcatgatgcgacgcaacgcgggcatgtcgtaatcgtcctgcaggcattcgcgggcggtttccagcagcagcgggaaattgcgtttcagccgcgcggcgttcaacagttgcgcggcacgcagtctctgctgccatagcggcacgcgcctgccgggatcggttctggggaggaacagcgagcgtgcggcgcattccctgaaccgggccgcgaacagcaccgtctcccccacctgcgtctcgatcatgcgctgcatgtcgtcagggtcgaacctgatgagctccgggacatcgatgtcatgctcctgggcgggaagcctcaggacgatgccgtcatcggcggcgtatgcctggccgtcgaatccataacgctgcttgagacgcgcggtgattgccatcgcccatggctcatgcacgcgacggccatatcgggaatggatgatgacccgccagtccccctcgtcgtcggggcaacgttcgatcaccatgcggcggtcatccggcacgacgccggtggccttcctctgctccgccagcagtcgggcgaggttttccacggcgttgtcgtccagcccgtcatcgtgcaggcggtctgccgtggcggtgtcgaaccgtggatggcccgcttctgcggcatccgtcagtccagtgcagacctgccggatgaaagcgccttcggccgtaccgaacccgcagtccctgccgctgccgtccccatgccagaacggcagacgggccgtcctgcccggtgccggggtgacgatcacgcggtcgcgggtgatctcctgaatctgccatgtggatgtacccagggtgatgatgtcgccgacacgggactcgtacaccatttcctcgtcgagttcccccactcttcgaggccctttgcccccatccgtctcgggcagcaccacggtgtacagtccgcgatctggaatcgtgccgccgctggtcacggcgagccgctgcgccccgggtcgggcggagatcaggtcctcatcatggttccacatcaggcagggacggaaggcggagaagtcctcgctgtcgtaggcccccgtcatcatgcccatcaccgagtcgaacgtgccgcggtcgaggtcgcggaagggtgccgacctgcataccgtcgcataccagtcgtccggcctgaggtcctccatcgatgcggccgcgacggtctgttgggcgagcacatccagcgggttgcggatcaccgatatcggttcgatgtcgccggcccgcatgctttccacgctcgccgccgccccgatgatctgctcccgggtcagagggtagatcagcgcatgggacacccctccgacacgatgatccgcgcgtccgacgcgctgcaatcctgacgataccgacaacggaggcgatatctgtatcaccagatccaccgaccccatgtcgatgcccaattccaggctgctggtggccaccacgcaacgcagcaggccatgtttgagctgttcctcgatccgtttgcgccgctccttggacaccgacccgtgatgggccatcgcgatgacgtccccgtcatcgtgagaccgaaccagcatcgtcgtggagccgaccacgggatcgtaatgccgggaaaacccgctgcgcccctccggtgactgcgtctgcacggcatcggtgccatgatcctgtgcatacaggtcgttgagcctggcggtgagcttctccgccaggcccctcgaattcacgaacaccagcgtggtgtggtgggagagcacctgatccagcacgtcccgctcgatcaccggccatatggatccgcccgcccgatcccccgcggcgccggtgatcgcctgcgaatcgtattgcgaatcctccggcgaaaccagaaccgaccgtcgatccggcgacactggcaggccacgccgttcggcgagccgtctcatggccggggtcacgccgctgatatgcggggccgatgccgccgacgcgccgacgcctcccgcacggccgggcacattggctgattggaggcccctcatgttctccagcggctcgacgacgcgcagatccatcgcgggcctctcctgcggattgatgacggtcacgggatggatcccgccgacgaatctcgcgacctcgtcgacaggccttaccgtggcggacaaccctatgcgctgcgtcgcatgcccggcgagcgcatccagccgttccaggctcacggccaggtgcgcgccccgtttggtgccggcgacggcatggacctcatcgagtatcaccgtttcgacgtcgcgcaggatgacgcgcgccttggacgtcagcagcagatacagcgattccggcgtcgtgacgaggatgtccggcggatgggaggcgatggcgcgtctctcccgtgtcgtcgtgtcaccgctgcgtatggcgatgccgatatcgggagcggcaaggccggacgcctcgcattcggcggcgatgccgtcgagcggagcgcggaggttcttcgcgacatcgacggccagcgccttcagcggcgagacgtacagcaccttgacacgccgagtccgatgccgctctccggaaacgtcagccgcgcccttcggagcggtcatggcaccggagccgttcagacgatccgcctctcccgtcatcaggcggtcgatggccgagaggaacgcgcataatgtcttgcccgagccggtgggcgcgaccaccagagcattgcccccggcatggatgaccggccatgcctggctctgcgccgcagtaggtacatcaaacgcatgtttgaaccatgccctggtaggacccgagaacagattcaaacattcgtacatatattcgattatgcgatgcagcctagacccacgacacaccactcgaagacgggcgacctactcctcgacccactccagcacatcgcccgactggcactccagcgcctcgcagatgccgtcaagcgtggagaagcgtatggccttggcccgcccgttcttcagcagcgagcgcatgaccagcatcagcagcacgaacgccgcgagcagcagcaggccggccgcgcccagcagggaccacgcccggagcccccagcgcaacatccacataggcacccgacgccgggtcgcggtattcggcatgggcgagacctccgtacagcgtcacgaacaacaccagcgccgcctccaccgccgcgcatgcgatgatcgcatcgacccagcgaaccgcgcggccggagaacacgtcaagccggtccaccaacgtcagcagattccacagcggcaccatcgccgcctcgacgcacgccacgcccagtatgcccgcgacggcatacacccaacgcgacggagcgaattccgggttggcctgcacgacgtcgcccgacaccacgaccatggcgcattgccccgccgcggacgatcccccacatgcagtgcagccagttcatgtgacgactcgcgtaatggatcgccacacagttgttcagcgccgcatcgacgccgcctgcgcccaatccgtaggggacggcgagcagcaaattggccatgattctcccggtattatccagtggtatgtacgttcgtacacatgctaggcgaaccacaggatatccgttctcgcaggccgaacgagcgcgccggtccgccgcgctccggacccgttcacggacgcatggtcattcgcgctcagcgcaaccatagcgtttctcgaataaaaacgagatgattgacccggaaaacctgaacgagaaaaggcggcaacatggtcggcaatgacacgatacacacggtcacgcgtaaggagcacgactgcatcggctacatggatgtgccgaaagacgtgtattggggcatccatacgcagcgggcgctcggtaacttcaccgtctcccgaatcgcggactccacccatccccagctgatgcgggcctatgcgaccgttaaacgcgcctgtgccgaagccaacgacgagctcggactgatcgaccacgacaaggcacggctcatcgtcgccgcatgccgcgacgtcgagaacggcgagctcgccgaccagttcccggtcgacgtgctgcagggcggcgccggcacatcgacgaacatgaatatgaacgaggtcatcgccaatcgggcgttggagctcggcgggcatcccaaaggcgattatgggttcatccacccgaacgacgacgtgaaccattcgcaatcgaccaacgacacctaccccgcggcctgcaagctcgcgctgatcgacgccatcgggccgctcgcggaagagacgaagaaactcacgcgggcgttccacgacctcgccgacaagcacacgaacgacgtcaccatcggacgcacccagctgcaggatgcggtgccgatgacctacggtcaggaattccacgcattcgcaagcttcctgaaaagcgacctcctggccctcgaacacgtcgtcccgcaactgaccacgctgaacctcggcgccaccgccatcggcaccggcatctgcgccgacctgcggttccgcacgaccgccacgcgccatctggccgccatcaccgggctgcccatcaccgcggcggcggatcccgtggcggccatgaccgatatgagcggatacatcgccacgtcgcagacggtcaagaacctcgccatacacctgaaaaaggccgccgacgacctgcgactgctcaattccggcccgcataccggattcgacgacctcaacgtgccggcacggcaggcgggcagcagcatcatgcccggcaaggtgaacccggtcatccccgaatgcgtgaaccaatgctgcttcatggtgttcggcatggacacgaccgtcacatgggccgcatccgaagggcaattgcagctcaacgccttcgacccggtgatcatccacgaactgctcaacggcatcgagctgctgacccgcgcgatggcgatgttccgcgagcgctgcgtgtccggcatcaccatcaacgcctcgatggggcgccgctacgccgaatactccccgtcgatcgccgccgcactgaacggcgtcatcggatacgaacacgcggccgacatcgcccaggaagcggccaacgacaatcgtaccgtgcgcgatgtcgccggcgagcgcaccgacctgcccgcgtcgacgctcgacgagctgctcgacccgatcgccctgtcgcgccgtctcggccagacctgccgggagcatcagtagacggatatcggctcgggccgccgccggcctgatacaagccgacggcggcccgggcagtgcacagccggcagaaagccggatcaggtgtcgatcttggagcggtcgaaatcgtcggcgttgtcgacgatgaacgccttgcgcggcggcacgtcgtcgcccatgagcaggctgaatatctcggacgcctgtgccgcatcctccatgcggatgcgccgcagcatgcgcgtgcgcggatccatcgtcgtgtccgcgagctggtcggcgtccatctcacccagacccttgtagcgctggatgtcgggattgtacgagatgtgtcgccgttcgaggtccgccagacggccggcgagctcgtcatcggagtacgtgtagatgaactcgcccttgtgcgagccggcgagcgcgatgcgatgcagcggcggcacggcggcgtagacgtacccgtgctcgatgagcgggcgcatgtaccggtagaacagcgtgagcagcaggatgcggatatgggcaccgtccacgtcggcatcggtcatcatgatgaccttgtggtagcgggactgctcgatgtcgaaaccggcgccggatcccgcaccgaccacctggatgatcgcggcgcattccttgttgttgagcatctggctcaacgatgccttctgcacgttgagtatcttgcctcggatcggcagcagcgcctggaatccggaattgcgcgcagccttggccgtgccgagcgcggagtcgccctcgacgatgaacagctcggccacatcgtcgttgcccggctggcagtcggacagtttcgacggcatggcggcggattcgagcgcgttcttgcggcgcgtgacctccttggtcttgcgcgcctggatgcgggcgtgcatctcgccgacaatcttctccagcacacgaccggactgctccttgtagccgcgtttggagcccgtgatcatctcgccgaactgcttgtcggtcatcctggtgacgatgggcttgacgggagcggtgccgagcacgtccttggtctgcccctggaactgcggctcggcgatgcgcacggtgacgacggccacgagtccggccaggatgtcgtcgcgctcgacgcgcatgttcgagtccttgaggttcaccttgagtttgcgggcgttgtcttcaacggccttgcggatctgcttggtgagccccatgaggaaaccgtcgacgtgcatgccgccgccgggcgtctcgaccacgttgacgaagctgcgcatcgtcgtgtcgtacccgttggtccaccgcattgcgatgtcgacgccgcatttgcgggtgactttctgggcgtgcagttcgccgccctcgccgaccgcctgggtctcctcctcgtaggtgtcctcgccggtgatgcgccagatgtcggataccgcctctcccgcggacaggaaatcgacgaagtccttgacaccgccggtgtggcggaattcctcgacgcgggcgtgcgtgtggcgggccgcgtccaccttcgccgtctcgaccgcggcggagactgcggcagatcgcgcttcggcttcacccgcttcaacggtatcttcgacggccgtgtcggccgcagagacgatgtcggcagcgtccatcaggccggttccatcgtcggcgggcgtctgtgcggcgtcgacttccatcatctcgtcgacgctgtcgtcgccggtttccggcacgttctcgtcgatgacggtgatccgcagtcccggcaccaggaaactggtctggcgcacacggtcgatgagctgctcgtagctgaattcggcggtgtcgttgaagatttcgggatcggcccagtaccggatgcgcgtgcccgtggtcttcgggctgaccttgccgatgatctccagctcggtcgggcggttcttgcgggtgcgcttgaacggcgcgtccggggacggatgctcgggatcggtgtcggaatatacgccgggatgaccctggtggaaggccatgtgatgggttttgccgtcgcggtcgacctcgacgtccagacgcgagctcagcgcgttgacgacggacgagccgacgccgtgcaggccgccggccgcgttataggacgcgttgccgaacttcgcgccggcatgcagcttggtcagcacgacctcgacgccggtgagcttggtcttcggctcgacgtcgacggggatgccacggccgttgtcggccacttccacggagccgtcgtcgtgcagggtcaccgtgatatggtcgcaggcgcccgcaagcgcctcgtccaccgcgttgtcgatgatctcccacaggcagtgcatcagaccctggctgtcggtggtgccgatgtacatgccggggcgcttgcgcaccgcgtccaagccttcgagcacggtaaggctgtcggcaccgtattcctgtttgggcatacaaatcctattttctgtataactcgcggctctcctcatcgaggggagctatcaacggatggctccgtcgggggggcagtccactggaccgcccctcctcgcgtgatcgcgctgccgagcggcgcgatcactgatcgaggaagtcgcgcagggtctgggagcgcgacggatggcgcagcttcgacatcgtcttggactctatctggcggatacgctcacgggtcacgccgtacacgcggccgatatcgtccagcgtcttgggctggccgtcctccaaaccgtaacgcatcttgatgacgccggcctcgcgggggctcagagtctccagcacctgcttgaactgctcctgcagcagcgagaacgcgaccgcgtcggacggcgcgatcgcgtcggtgtcctcgatgaggtcgccgaattcggaatcgccgtcctcgcccagcggcgtgtgcaacgagatcggctcgcggccgtacttctgcacctcctgcaccttctcgaccggcatgtcgagctcgcgggccagctcgtccggcgtgggctcgcggcccaggtcctgcagcatctggcgctgaacgcgcgacagcttgttgatgacctcgaccatgtgcacgggcacgcggatggtgcgtgcctgatcggccatggcgcgggtgatggcctgacggatccaccacgtggcataggtggagaacttgaagcccttcttccagtcgaacttctcgacggctcggatgaggcccaggttgccttcctgaatcaggtcgaggaagagcatgccacggccggtgtagcgcttggccagcgacaccacgagtcgcaggttcgcctccagcaggtggtccttggccttcttgccgtcgttcgccgcccacttgagctcgcgcttgcgcttgaagtccatgccgtcgctctcggtatcgagcagatgctgggcgtacaggccggcctcgatgcgctcggagaggtccacctcctgctcggcgttcagcaggctgacacggccaatctgcttgagatagtccttgaccggatccgctgtggcgcccgcagcgatgacgcggcgcttcggattgcccgacggggtcaggttctcgtcgtcgtcatcgtcgcgcaccacgaacgcgcccttctccttgggctgttcaggctccttgcgcccgggttcagtcccctcgtcgtcctcttcgtcctcgggaacgtcgtcatcctcaccggattcgtcatcgatgtcatcatcgtcgccatccagaccgccgtcatcgacgtcgtcgagatcgtcgtcaaggctctccagaccatcctcatcgacctggacgtcgtcgagatcgtccgaggaatcctcgttggcgagttcctcggtcttcgccatctcctcggtctcgtccttgacggccttcgccgacttggacgcggcgcgcttgcgggtgggcttcgcgggcgcggctgccttcgccgaggacttgcgtgccgtggacttggacgcggcggacctcgacgaggtcttcttgcccgcggcggatttcctgcccgctgcggtcttcttgtctgccgtagaggccgtacacgcgtcggttcccttcttctcggatttcgtcttggcgtccgtatcgtccgggactgtcgtcgccatcgtatccttcgtggccaaactcatcctcctgcatcatcatgccaagcgtgcttataccacatcgggcgcacttctggcaagagcaaatcgtcaactatgcgagttaaccatcttccaaggacgattattcccacggcttgttgcggcgtggaaccgatggtctcccgcgagccgtcatgcggcgtcgtgatgcgggccggcacccatccacgccggcatcacgccgcgctggtacgccgagcacacgatcgccgccagcgaacaatcctcatccagcatcaggcagcgcaacgcgaacgccaccgctcgactgtcgcccatccaccacatcacatacgccagcacggccagcggctgcacgctgaagctctccggaacgcgatcggccatggccacgagcatgtcggcgccggcccggcatctcggttcgtcgggccgacgtcgctcgtcgaaaaacgcgccctgcagctccctgcacatgcggctctgcacatccggcgcatgcgagcgcgacgcgaaatccatcatcgtgcgcttgtcggcgcaggtgtccccggccaccaatgacatgatcagggcgtccctgatcgacaacgtcaccgtcattcccaccaccagcgcggcgatcgaggcgtcatcgatggcctgcggctgcgccgacaggcccgccagccaatggtcgaacggctcatcggcccattgcgcgtccgccgccacggtgccgctgagcttgcggcgctcgcagtattcatcgcgcatgcgtctgagatcgtcctcgcgcagcatgtcatcgtccgcgaccgcctccgcataccggacggcctgcgtgttcgtctcctgtcccatatcgtggtcccccttaccggtctcatccaccgccggcgcacgatgccggcgaccgccgcccccgcgacgggataccatcaactatgccgtatcgggccggttttcagggcgaaatccaacctatgtggtcgaaggcttgtcaggcttgcaaatccgcagttcttgtattcgtaaaaccctgtggataacctctgggtatgactgtttcatctgatttggccctgatcgagtcccgcatcgccgacgcggtggaccgtttcatggcgctcgacgccgacgacaccatcgaaggcccgtgcttgaccatatcccgcgaggtcgcgcgtcaggccctggtctccagcgaaggcggcaagcggctcagggcgttgctggccctccacgccttcgacgcgaccgacccgcaggggcatgacgacgatgacgcccatgcccgcggacgcgacgcggtgctcgacctggcctgcgcgatagaggtcttccagaccgccgcgctcgtccatgacgacatcatcgacgactccgacctgcgacggggcaaaccagcggcccacaaggcgctcggcacgacgtcgcacagcgcgtcgctcggccgaggactgggcatcatgctgggagacctgctcgccaccgccagcgtcgacatcgcccatgccgcggcgcaacggatgccccggcccgacatgatcgtctcgacgttcctgcgcatgcaccgcgaggtggagatcgggcaggtgctcgacctcgcagttgagttgtctccattggacgagccggaacggctcgcacgggaatccatgaacgtgttccgatggaagaccgccagctacacgaccatcgcgcccctcgaattcgcgcttctcgcctccggccgagaccccaggcgggcacatgccgacgccatggccatcggactgccgctcggccaggcgttccagctcgccgacgacctgctggacgtcatcggatccagcagatccaccggcaagcccgtgggaggcgacatcagggagggcaagcgcaccgtgctgctcgcggacgcgatcagcggcgccgaccagaggcagcgccgcacactgatcgacatgttctcgtcgcagtcgcggggcgacgacgacgtacgccggtgtatcgagctgttcgaaggcaccggcgccatcgaccgatcccgccggcgcatccgcgcactgtggcagggcacgcttcatgccataggggacctgcggctcccaccgcaggacgagcgcacgctcaccgaggcatgcatgaggttcatcccgatcatcaaagcgtagagttttcgccaacgtatgtattggaaatgccgttttccagcagaaagaaccttacgatacaaccatgagtgaagtcgcagccacgtcgcaagagccgcagggacgaatgatagaggggcgataccgcgtcatacgcaaaatcgccgaaggcggcatggcgaccgtgtacgaggcggaggataccaggctcgaacgccgcgtcgccatcaagatcatgcacatgcagctggcgcagggagcgcaccgcgagcagttcgtggaacggttccaccgcgaggccaagtccgccgcggcgatcgcgaacccacatatcgtgcaggtgtatgacaccggagagttcaatgggctggactatctggtcatggaatacgtgcatggcgtgaacctgcgtcacgacatgaacctgcagggcacgttcagcgtgcgcgagatgctgcgcgtcatctccgagacgctggacggactggcagcggcgcaccgcgtgggcgtcgtccaccgcgacatcaagcccgagaacatcctgatcaacgaccgcgggcacgtgcagatcaccgatttcggtctggcgaaggccgcgtcgcaggcgacactgtcgaccaccggcatgctgctcggcaccgccgcgtatctggcgcctgaaatgatcgaggacaacaaggcgaccatgcagggggacctgtattccgtgggaatcatggcttgggagatgctcgccggcgacgtgccgttcacgtcggacaatcccgtcaccatggtgttcaagcacgtgcatgaggacgtgccgtccctgacctcgacctgcacgggcatcaaccagcaggtcgccgatttcgtctcgcatttgaccgcccgcgccgtcgaggcacggcccgccgacgcatccgacgccctgcatgagctgcaacagctgaccgcgaacctgccgatggacgcatggcagtaccgcaagcccgccgacgtaggcaccagcggcgataccgaggagccgaccgcccccgcgctggtgggcgccatcccggccccgcccgcgccgccgctgttcgattcgcgcaccggcaccgccccgcagaccggcaccgcccctgccacggcccgtacttcggtgatgcctgaaggcaccgcaccccaggacgtctccgccacccaggtaatcacgccgcaggatcccgcactcaccatcgggctgatggacgcgcgcccgctcgatgaccaaggctcggagcccgccaagcgcaagcgctcgaagaaacccttgatcatcacgctcgtggtggtgctcgtcgtggcgctcgtcgccggcgcaggcggctcatggtggtatttcctcggtccgggcagctactggacgctgccgcagcccaccgacatctcctgcaaggagaacaccgaatgctccatcgtcggggcgaagtggagcgattaccagagcacgctgaacgtggcgaacatcccgttcacctcctccgaggcgtacagtgacaccgtcgccaaggggaacatcatctccgccgacccgcagaacgtcggcacccatatcagcaagcgccacaacggacgcatcacggtgacggtgtcgcttggcgtcaagcaggcgaccatccccagcgacatcgcggatccgacgtcggccgatggcaaggatccgatcaaagcgcttgagaacgccggattcaccaacatcaaacgcgatgactcctcagccgaatattcgatgacgctgccggagggagccctgcaaagcatttccgagacgcccggctcaaccctggaccacaacgccgagatcaccgtggtactatccaagggactcatgccggtcaccatgccggacatcgtcggcaagaccaaggacgaggccatgaccgccctcgacaacgcgaagctcaagaccaccgtttcggaggagtacagcgacagcgtcaagtccggcagtgtcatctccgcctcgcccgactccggtaccgaactgcattggggcgactccgtgaagctgaccgtatccaaggggcccgagaccgcggacgtgccgaacctcgtcggcaagagcaagagcgacgccatcaagacgctggaatccctcggtttcgaagtcaagaccggcggcttgaacatcctcggcctggtgcagcagcagagcgccaccggcaagacgaggctgcgcgacacgaacggcaacaagaccgtcatcacgctcaccgtcgtgtgacggcggcgcgccggcatataccggcatatacgcgaagcggctccccctctatcagtttgagagggggagccgcttcgttcgcgttcgggatcgtcggtcagtggccttcgccggcggttgcggcttcggcctcctgccgggccttgagctccgccttgaccttctgggcgtactcgtccacgtattcctgtccgctgagctttcggatctcgctgacgagatggtcggtgagcgcccgcacctcctcatgggtgatctcgtcggcgtccttgcgatccaccgggatgggcttgccgtatatcaccttcgtcttgcccttcgacgggatgacctgaccgggatgctgtatctcgcgcgttcccaccaacgcggtcggcaccagcgggcagccggtctccagagcaaggcgcgcggcaccggtgtggccccggtacagtcgcccgtcaggactgcgcgtgccctccacgtggatgccgaacaggtggccttcctcaaggatctcacgggcgtgggccaacgcgcccagcgacttcgagccgccggaacggtccacggggaacactcccaccgacgtgaaccaccatttcttgaaccggcccttgatgcccttgccttcgaaatactcggccttgcccatgaaatgcaccatgcgcgggcaggtgatgggtatcagcgcatcgtcgatgaccgccagatggttcgcggcgatgatggcaccgccttcacgcggcacgttctccagtccgatcgccgtcggtcccatacgacgacgggcaatccaaccgaaacctttgacaaagaaccagtacagcacgatgacacctcccaagtttggccgtccgcctgattacagtaggacggtatgaccgatcatcacgatagcaaccacaacgataccaacgcgggtgaagaacatccaaacaccacgccgcgcgccggacatgacgggtatgacacaggctccaatgccggcgacgatctcgactgggccgccttcgccgcggagcatgccaacgacctgcaggacgtcgagcgctcacgcaacgcgcggcgcttcgagaagcatgcgcagcgcaaggagaaggaggcgctgctgtcggtcgacgatctggacgccggcacgttcaccgatgacaaggtgccgctgcaccagcgcggcccccgcgaccatggcggccgcagctggctcgataccgatgacgtcatggacgagtacggcgatgacttcgtgccgccgaacccgaaaatcggccgcgtgaacgcctcgaagctggtgttctggatcctgctggtcgcaggcgtcgcgggtatcatcgcatccgtgttcgtacccgccctggcgacgttcctgggctccatattcggtctgtgcgcgctggtcggcggcgccggcctcatcctccaacacaaggggcacaccgagacacgcaccgacatgttcgacgacggcgcgcggatatgacgacggtgcccgtcctcatcggacgggcaccgcaatgatcaggccttggacttggcggtctcgatccacttgccgaacagggccgcggccttgccggaatcgacggtgttctcggcgagcgcatacgcctcacggaaccgctcggcgagtgtgccgtcgccgaccaggttgccgtctgccacgatggcggacgcagcgttgagcaacgcggtggtgcgtgacgggatgtccttgccggccaagaagtccgtgaacgcggcggcgttcacatcgggttcgccgcccttgagctgctcgacggagatcttggcaagatccagatccagggtcgggtcgaaatcggtttcggtgaccttgccgtcgcgaatctcccacacggagatcgggccggtgggagcaagctcgtcgaggccctcgtgcgaggtgtagaccaggccggactggccgcggctggcgtacacggcggccatgatcggactcaccttgcggttggcgcagccgatggccacgtgcgccggattggccgggttggtcaacggtcccaggatgttgaacacgcacgggatgccgagcgcggcgcgaatcgggccaacaaagcgcatggccgggtggaaggtgcgggcgaacgcaaaggtgatgcctacctcgtcgccgatctccccgaccgcctcgggcttcagatccatcggcaggccgagatcctcgagcacgtcggcggctccgcacttcgaggaggcggcgcggttgccatgcttgacgatcttcacgcccgccgcagctgcggccacggaacccatcgtggataggttcacggtggcgaagccgtcaccgccggttccgacgatgtcggtggtctcaccggacacgttgagcggcacggcgtgggagaccatggcctttgcggcgccacacacctcgtcggcggtcagtcccagctgctcctgcatggcgaacgcggcacccacggcggccggatcggcgttgccctgcatcaggtcgtcgacgaaccactccgattcctcagcgctcaggtggtctcccccgaccagcttggtgagaatcgacttccatgtgatctcggccatgatgccctccttggcgtttcgtcacgccgcgtgatatgtattcgtcgcctcattgtaatggcttgtcgtttcgtcgcccgtaatcttccatattgcaaaacatcatcggctcccgtcagcgggagccacttacttgtccagcccggacagcgtgccgacaatcagggcaggcaacgcggcaggcatcgccacgatgccgctacgggagtcccgactgaaacgttatgcagtatcccaaggctttgccgggcaatggatcggaatcgctgcagggtcaatgagatcgccgcgcgcgtaccaggcctttgcactgatgggcaccgaatatggcggacaacgcacgcgtatatcgattgatgcgcgcgttgtcctgagacgatatcgggaaccccagatagcggcattttacaaacggtagaattccaacgatttcgcgatttgcgtcgtgggacaacgcacgcatcaaccgattgatgcacgcgttgtcctgcggtatcgctgtacaacacgcgcgaatccatcaaaatcgtgcgttgtacagcgaatgaggctcggcgaacctcgattccgcggccccgcgaataatcgacgggctcaacccgcggacaagcccttcctctccccccgaaaacgcaagtggctcccctcacatcgagggaagccacttactcgtctagtccggagagcttatatcactcttcgttctggccgtggcacatcttgtacttgcgaccagaaccacacgggcactgcgcgttcttggacgtgccggggaacgtacggccgtcggaccacggggtcttcagctcctcgttcttcgggcgcttgttggcgggcaccttgccttcggcatggctgatcggagccgggccggtgatcggcgcggtggcctcgcctgcagtggattccttggcggactgggcgatggcgaccttctcgtcggattcctccgcagtctcagcctcaccggcgtcctcggccttgtcgacttcggagctagcggcgccgacggcctcttcggcctcatcaacggcggcgtcatcggactcgatgccggcttcctcgctcctggacacctgctgcacgtcgacgtggaagagcagctggacggactcctccttgatcgcctcgatcatggagttgtacatctggtagccttcgcgctggtactcgaccagcgggtcgcgctgacccatgccgcgcaggccgatgccatccttgaggtagtccatctcgtacaggtgctcacgccacttgcggtcaagcacggcgaggaccacgcggcgttccagctggcgcaggccttcctcaccgaccttctcctcaagttcggcgtactcctccctggcctgatcgacgagggagtcgcgcacggccgcaacggccttgtcgcccttgagcttgtcggcggcgttcttggcggcgtcctggtcaagctcgaacgggaacacggtcttgagggccttgaacaggccgtcccaatcccagtcggagggcttgctggaacccttctgggcacccttgatgtagctgtcgatggtatcggcgatgaagcgctcgatatcaccgtgaatgtcctcgcccttaagcaccgcctgacgctcggagtagatgacggtacgttgcttgttcatcacgtcgtcgtacttgaggacgttcttacggatttcgaagttgcgcgcctcgacggtcttctgcgcggtgcgcacacccttcgacacgcttttcgcctcgatcggctcgccttccggcatgcccttggccatgacgcgggcgacgagctgcgtgttgaacagacgcatcaggtcatcttccagcgacaggtagaagcgggactcgccaggatcgccctgacggccggaacggccgcgcagctggttgtcgatacggcgggattcgtggcgctcggtgccgagcacgtacagaccgccaagctcgacgacctcctcatgctcgtccttgacctgctccttgacctcggccaaggtgcccggccagcgcttctcgtactcgtccggcgtgtcctcgggggaatagccctcggacttgagcttctggtcggccaggaactcgacgttgccgccgagcatgatatcggtaccacgaccggccatattggtggcgacggtgacggcgcccttgcggccggcgaccgcgacgaccttggcctcgctggcgtgctgcttcgcgttgagcacctgatggtcgatgcccgccacgtcgagcagcgaggagacgacctcggaggactcgacggatgcggtacccagcagcaccggctggcccttggcgtggcgcttggcgacgtccttgacgatggcggccagcttctccttcttggtgcggaagatgaggtcgtcctggtccttgcggatcatcggcttgttcgtcgggatcggcagcacgcccagcttgtaggtgcccatgaactcggcggcctcggtctcggcggtaccggtcatgccggcgagcttgtcgtacatgcggaagtagttctgcagggtgatcgtggcgaaggtctggttctcggccttgatctccacgttctccttggcttccagcgcctggtgcagaccctcgttgtaacggcggcccggcaggatacggccggtgtgctcatcaacgatcagaacctcgccgtgggtgacgacgtagtcgcggtcacgcaggaagagttccttggccttgatggcgttgttgaggtagccgatgagtgcggtgttgctcggctcgtacaggttgtcgatgccgaggaagtcctcgaccttggtgatgcccgggtcgagaacgccgacgaccttcttcttctcgtcgacctcatagtcctcgtcgcgggtcagcttcggcacgagacgcgcgaactggcggtaccaacgggtcacgtcgccctcggccgggccggagatgatcagaggggtacgggcctcatcgatgaggatggagtcgacctcatcgacgatggcgtaatggtggccgcgctgcaccagatcggccttctcccacgccatgttgtcgcgcaggtagtcgaagccgaactcgttgttggtgccgtaggtgatgtcggcgttgtactgcttgcggcgctccgccggcttctggtcggtgatgatgcagccgacgttcatgccgaggaagcggtagatacgacccatcagctcgctctggtagcttgccaggtagtcgttgaccgtgaccacgtgcacgcccttgccttcgagtgcgttcaggtagctcgggagcgtcgcgaccagggtcttgccttcaccggtcttcatttcggcgatattgccccagtgcagggccgcgccacccatgagctgcacatcgaagtgacgctgtcccagagtgcgcttcgacacctcacggacggtggcgaacgcttcgggcatcaacttgtcaaggttctcaccgttgtccagtcgctgcttgaacttggcggtctggcctttgagttcctcgtcggacagagcggaaatctcgtcctcaagggcattcacggccttggccacgttctccagtttcttgagctggtgcccttctcccatgcggagggctttgtcaacgatatctaccacattcgctccctgtttaagctttcgtacgtcaacgagcatagcctgatgcccgacatcaggcacaaactccatccatgatatgcgaacactcggatttttgccgttccgacccgctggacacgcccatcgatacttgtttcgtcgtgtgccgacacgcaaatatggcctgcctggctatgccgggcaggccatgtatcacgtggcggaacacttacttgttcttgatgttctccggggtgtcgatctcgaacacgccgtagctccaaccgtggcggtggtaaacgacggacgggcggccggtctccttgttgacgaacaggaagaagtcgtgaccgatcagttccatctcgtacagcgcctcgtcgatgctcatcggctcggcgatgtgcagcttgcggcgaatcacgatcggcgtgtcaccgacctggacctccaccgactcgcccggaccgaggtcggaggcgacggcggcttcggggctgttgttcggctcttccggctccggctcctcttccggttccggcggagcgaccgctcccagatcgacgggcgtcgggttgatgtacccgcggcgatgatccttgcggcggtcacgggtgcggcgcaggcgcagcgtcagcttgtcgagcgccatgtccagagcactgaactcatcggtgctggaagcctcggcgcgcaccacggtgctgcctgcgatcacggtgatctccacacgcttcgcggtgtcggcctgacgcggattcccctcatgcgtcagcacgatctgagctcgttgcgcatccggcgcgatagcggtcacacgattcatcttgctttcgacgacatcacggaacttctgcttgacttgcgtatgacgtccggtaacgacgatttccatgtggacctccctatactcaagcggtgtcacccgctatatgtgtgccgaatggcgtcatcaccacccgggtaagtttcattgtagccgaacagagggtaaacggcggggaactcgcccagagaaatacgtttcttttttcacaggttcccgtaacgttgctgtgcttatactgtgcggcttactttccttgaaggaaactgttatactttttggtctggcgacacagatcgttgcgctgctggtattgctggcgctgagccgcagcatcacatcaatggaggtcttgctctggatggtcgtcatagaggtcgtgtggtccgtgtacttcgtcgtcaccgaacgctggcacgacaagcttgcccgcaaggcaatgctgacggtataagaccattcgggcagaatcgagcatgcaagcaaggccagcgacataacggtatggaatgttcgggaggtgcctgtgccagtcgagccacgattcgatcctgtgatccatgagccgatgcggctgcggatctgcggcatcctgtcggcggccgactgtggggtggtcaccacccgccggcgccacgcgccacctcccgccagcgggaggatgagcacccccaccgacagcaattcggcattcggcgttcatcgtctcgcccggtgcgccggccaaccctgattctcctgcgtaaaatccctggcctgccgtatagtagctgattcgagacccccagatggccgcggccgcgtcattcatttggcaaggctgaggaacttccgggctccgcagagcacgatggcggataacgtccgcccagggtgacctgagagatagcgcagcagagaacagaccgcccgcgcaagcgggtaagggtgaaacggcggtgtaagagaccaccggtccgctggtaacagtcggtcgcatggcaagcctcatcgggagcaaggccaagcagaagacggcaagggctgctcgcccgtgtcttcgggtaggccgctagagcctggcggcaacgtcaggtcgagatggatggccatccgcgtggcgacacgcgacagaacccggggtatcgggggtctcgcttttctttaccccccccgaatccgcatacctcccgccaacacattcctcccaccaatatgagggcgcgcgaacgaaacaacgcaatgccggcagccccgttccctcccgctggcgggagatggcgcgaagcgtcggagggtgttctcacgccggcaatgcggtaagaccaccggatcgacaaaccaccgggccggcaacccgccaccccgccaagccaccggggcatctcccccgcttgccccgcgctgtatctcatctaagagatagttcattgagatagttcattctaatcaaatagctcatgggctacggcacgcagggtttcggcgtcgtgccccttgcgcccgcccgaggaccagaaccggcgcttgcgcactttcgggtccatgccctgtgtcttggcggcgctgcgccgccccaactcccatgcggcgtcctcgaagacaccgctcatgcgggcctcgtcgcagacccgctccgccagcggacggtcgacccccttgcgagccagttccataaccgcaccgcggtatcccatcagacggccgacgcagtagcgcacggcagattgcgcgtacgactcatcatcgaccagaccaacctcgatcagcctgtcgaccactgcggcgaccgtctcatcgtcataccctttgtcgatcaggcggtctcgcagggcgcccgatggacgatccgccgcatccagcaggcgcaatgcggactcccgacacgcatcgacatcgcagggatcctccggctcccgcccaggccgcgacatgctccgcgcggagcgccgagccgggcggtccccatgtgaccatgttccgcgtcgcggggagtcgacgcccggttcgacaaccggcgtctcacatgttccatgagcggcgaggaacgcttctgcgctgatcatgcggcaggcgatgcggcggcagcgggcgcgccatcctccggcgccgtttcaggggcatccccgtccgtcgcggactcaccgtcggccagctgatcgggcacttcgatgaggccgaattccgccttgaccttgttgccgatctcctcggtgatctgcggattgtccttgaggaacttgcgcacgttctcacggccctggccgagctggtccccgtcatacgtgaaccatgagccggacttcttgaccacgttgcactgcaatgccatgtccaggacggatccctccttggagatgccctcgccatacagcacatcgaactcggcggacttgaacggcggagccatcttgttcttgacgaccttgaccttggtgcggttgcccacggcctcctcgccgttcttgatggtctggatgcggcggatatccagacgcaccgacgcatagaatttcagcgccttgccaccggtcgtggtttcggggttgccaaagaacacgccgatcttctctcgcagctggttgatgaagatggccgtggtgccggcctgtgccagagcgccggtcatcttcctgagcgcctggctcatcagacgggcctgcagaccgacatggctgtcacccatatcgccttcgatctccgccttgggaaccagggccgcgaccgaatcgatgacgatgacgtcaagggcacccgaccggatgagcatgtccgcgatctccagcgcctgctcgccgttgtccggctgcgagacgatcagggaatcggtgtcgacacccagatgccgggcatagaccggatccagcgcgtgctcggcatcgatgaatgccgccaccccgccgttcttctgtgcgttggcgaccacatgtagcgccagcgttgtcttgccggacgattcagggccatagatctcgacgatgcgccccttcggcagaccgccgatacccaaggccagatccaacgccagcgatccggtgggaatcacctcgacgttctgctcgggcttgtcgcccaagcgcatcgcggatcccttgccgaagcttttctccacttgctccagagcggagtccaaagccgccttgcgtcggggatcgatgccgtcccccaccggcccattgcttgcggcctcacgaacagaggccttcgacgcggccttgcccgccccacctttcgaggtcgtacgctgtgccatgtcaatctccttacgttgtcatccatatgcgccatatgccacatgcatcaaccgtacggaacatacgaaccccggcgcaaacgaatccggccaatgtggtcgaaggctccccggcatccatcgatccgcaccgactcccccttactgtcgcaaggaattcgtcggcgtgtcgaaccgtgcggcgcactacgtcatatcatcgtgcactgtggataactataccccaataggcgaacacctgttcgatatcacacgttccgcgtgtctcgtcagcggaccggcatcggaggcgcgttgtgatcggagccccaacgctggggatcgggaacgtccatatggtcgcacagcacgttccataccacgcgcggctgctcccccgcagacagcgcctgcgccgcggtaagtcccgcgagcgcgtcaagatgctgatcctggaccaggctccggccatacccatgaccgaacacctcatccaccagttcccagaattcccgttctcgcatgtctcccagtctaacccggccccgccgccgcgaatgccggcataccaatcgacgccacacccccgaacacgacgaaaccgcccgccgggcctcaagcccatgcggacggttcctctcatgcacacgatacgacgatatgcatatgcacgcggcatccggcgccgcaaatcgctattcgccgatcgaatccagataatcggcgacgagccgcagcatctgcgcggtgcttacacccagtgatcccgcgatggagctcagcagttcggagcttgcctccttctgcccgcgctccacctcggacagatagcccagcgacacgccggccttctcactcacttcacgcaacgtcttgttgtcgcgggtgcgaagatcgcgcagcacatggccgatggcctcgcgcagcgacacatcctttccctcgggcaacgcctcgacgccacgcgagaccgcgcgctgacgcggttcgaaggaatcctcctccatacgcatacgattcagttccgcctgccgttcatccttggccttcttcgccgcacgcacccgcagcacctgctgctgggcgaacaacacggcacgccgctgcgccggcgtgagatcacgcatcctggccgtacccggctgcacctgcttgacggggatgccagccgtttccatccgctcgcccgttcgggtcatcgtttccatgagaccctcctttcatatcgtccaagtgcttccactgtgttcaacaccgccggcggcggtttattcctgcatatctcctgtgaaatggctcacgatttgcacaaggctgaatacggcaccgcgacggacctcctcgcgcccacccgtcagatgaagctcgtgggcggtcacggacggcacgccgtcagggcttatggcggctggaatccgcactcccacatacaccagtcccgcgggcttgtctccatccggtccgggccccgccacgccggtggtcgacaatccgatgacacggtcagcgtattcgggctgcccgtacagcccggcgaccgacgccgccatctgtcgggccacttcgggatgcacggccccttcgcgttccaacaaaccgcggtcgacccccagaatcgacgccttggcacgaatgtcgtaggtgaccgccgacccgagaaacacgcgggatgcgcccggcacgcgcacgaacgcatcggccagcagcccgccggtcaacgactccgccgcaactatcttcacgtcatgcgcctcgcaaaaccgcagaatccgcgcggccatgtcgtcgcaacggcacgaatcggcatcattcatcgcaatccccctccatcaaacgccatcaaacaaaaacgccgccgtgcgcaggcacgacggcgtccactcgctcagtccttgcggctcccgaacgtgttgatcagatatatcgcccccgaatacaggcacagcatcagcgcgatgtatatcagggcgtacgtcagcgtgtaatatcccgtcatccacaccggcgcggtctgggccggattgaacacccacacgggcagcagcagcatcgacaggccgatgcactggaacagcgtcttgagcttgcccggccaggcggcggcgatcaccttgccgcccttgtcgatgacaaagaagcgcatgacggtgatgcccacctcacgcagcagaaacagcgcgacgatgatccagccgagccagacgggaccgagctcgccaaacaccgcggccacgatcagcgtggcgcaggtgagcagcttgtcggctatgggatccatcagcttgccgagttcggtgacctggttgtacttgcgggccatccacccgtccaccttgtcggtggacgcggcgacgatgaacagcacggccgcggcccatcgcatggggatgttgttctctccccacgagcctgcggcgatgtacaggccgaggaatatcacgaccagcacgatgcgcgaatacgtgacgaggttcggcggtgcgttccagccgtccagcagcgacttcttggcggtcgccgagcgttccgttgtatcgttttgcatatcgttttccatagtgttcacgatacccccacactcctaccttggatgaatatgcggttcgagttctctgggaatcccgtcagatatggctgcatcatggccgggtcaggcctgccggtcaggccgacttggcacccactacgccaattcgccctgctgcgcggccgcggcgggcgcagaggcctgcatcgcatcggtctcgccacgaatgaacgagagcaccgcaggcagatcctggggctggacgagcacctgacgggccttcgagccttcggacgggccgacaacgccacgcgactccagcaaatccatgagtcggccggccttggcgaagccgacgcgcagcttgcgctgcagcatcgatgtggaaccgaactgcgtggtgaccaccagctcggccgcctgcagcaacacgtccatatcgtcgccgatgtcctcatccggctcgacggccttcttctcggcctcctgcgccatctgctctatgtcctcgcggtagtgcggcttgcgctgtgtgcgcacgaactcgacggccttgcggatctcggactcgttcacccacgatccctgcacgcggatgggtttcatcgagcccataggcaggaacagggcgtcgccctggccgatcagcgtctcggcgcccaccgaatcgaggatgactcgcgaatcggtggcggaggatgtggcgaatgccagtcgggacgggatgttcgccttgatcaggccggtgaccacgtcgaccgacgggcgctgcgtggcgagcaccaggtgcacgcccgcggcacgcgccagctgtgtgatgcgctggatcgagctttcgacgtcgttcttggcgaccatcatcaggtcagccatctcgtctacgacgacgagcaggtacgggtacggggcgaccttgcggttcgaaccggctggcgcatgcaccttgcccgcgcgcacggcttcgttgaagtccttgacgtggcggaatccgaagaactgcaggtcgtcgtagcgcgcgtccatctccttgaccacccattcgagcgcctgtgcggccttcttcggatcggtgatgatcggtgtgagcaggtgcgggatgcccgcatacgcgctcaactccacgcgcttgggatcgaccatgatcaggcgcacctgctcgggcgtggaacgcatgatgatcgacatgagcatcgaattgatgaagctcgactttccggagccggtggcgcccgccaccagcaggtgcggcatcttggtcaggtcggcggtgacgaaatggccctccacgtccttgccgacgccggcgagcatggggttcgggtcattcatcgccttgtcggagcgcagcacgtcgccgaggtggacgatctcgcggtcatcgttcgggatttcgatgccgatcgccgattttccggggatcggcgagaggatgcgcacatcggagctggccaccgcgtaggcgatgttgcgctgcaggttcgtgaccttctcgaccttgacgcccgcgccgagctcgacctcgtactgggtgacggacgggccgcgcaggaagccgacgactttcgcgtcgacgttgaactgctggaacgtggaggtcaacgcgcggatcacgcggtcattggccggcgtgcgcacggcatgaggctggccgtgcgacagcatgttcaggtcgggcagttggtacggggcgtccggcgccgcaagcgcagggtcgtccacattgggattcatgttctcgcccgcaccggccgatgcgcccgaggaggcatccggggacatggaggaaatcgcaccggcagcgcccgcggcgggcatcgccgcccacggatcggacgtaccggcaaccgtcgatgagaccaacctcgcactcccggccgccccggctcccccgtcgggatccgtcgcatacgccggtacgcctgaggtaccggaagatgcggcaccggggtgtgcggcggccatgccggatgtcatcgtcgcgacggcatcggcggcgtgggccgccgccacgcccccggacatggcgccggcagctgctccggccatcgcgcccatggtggaggacaccgtgcggggcatgacattgccgcgtgcgtccagtgatgtctcggcggcctgcccatgccgactcgccgcgtgggagaacgggtcatcccccgcataccggtcaagtgacgcgtcatccgtcttctccgcggacttgcgccggaacagacgggagaaccatccgcccttcgcgtccccggagtccgactcagtttcgtccgtaccgtcatgggcggggacgccctcggcgaacgccagggtctcatcgccgtcacccacacgcacctcgttggggaactgatcctgttgcgcggccgaatccggctcctgccgaggatgcagggaacgatgcgagatcatggcagcgatggtgcggacgcgatccggcacctgagtgacatgggtgcgggtgatcatcagcagcgagaacaagccgaccaccacgaagacgataacggcgaacaccttcgacaatccccatgccaaaggcgagcccagcacgaaaccaagcagtccgccggccctttgcagcaggccgatgtcgaacgaacgcgcgtcggcggccacgaccacgtcgatgatcgagcagacggaccacaacagtatcgcccagccgctcaccacgcgggggttgtcggaattcttgccgctgttgcgcatcagacggatggccacgatcaccagcagcaccggcaacacgacgctcatcacgcccagcacgccggccgagaacgcatgcagcacccggccgatgatcccgttcacgcggaaccattcggaagcgcagaagaatacggcgagcacgatcagcaggaagcacaggccatcccggcgatacacggggtcgaattcacccactccggcaaccgaccgaaccagtgagccgaagccgcgcggaaccgcgagaatgatccgcttccacagcggctcctcgaccggggtgcgggcatcgtcccccatgccgccacgcccgccggaagctctcttcccggtctcgccgccgcgcgacgaagcacgctgcgtgcgggtgccacgcggcgagtcgttggaaggaccattgcctgatgaggatgttgttcgtgccatagcgtcttcagattctacccatcacccgttatttcccgatcaattcgcgtcaaaacccgcgcgaggggcatcggcgcatgtaccatctaactatgactccagcagaacgtgcgagcgcagtcgcatttgcactcaaaaactgcgcattggaagcgatggcgccgggcgatgcgacgatgcgcgccgcggcgggatacgagcggggcgacaacgacgtatccgctctgatcgacgccgcggaccgggagacctccgggatcgtcagcggcaggctcgccgacgggagccttgacgatcatgccaccgaccacgccagcagcgtgttcgcccgaacggtgctgttggctgaacgccgttggaatccaagcggcgaccttgccgagctcatcgccatccaccggggactgttcgacggcgtgttctccgacgccggacagctgcgcacctcgaacgtcacccgcgaggtcaccgacaagcggcatcaggccaagaaccccgaggcgttctttcccgcgcaattgatcgagaccggcgccttgaacatctcgaccgagcttgccgacaagcgcaacctggacaacctcgaccggggcgtgttcgtccgggagctcgcccacgtctacgacgaactgggctacctgcacccattcaagggaggcaacgccatgacgcttcgcatcttcgcgtcccgtctcgcgcatgacgccgggtgggatctcgactggggaggcgtgacgcgcgagtcatacaagcaggcgaaacacgccgcatatcgaggtgacatcaacgccttcagccagatgttcgccgacatcgtgcgccccgcgaaccccacgcgggtcttcctgatcgccggctgggagcaggggcccgcccactgaccgaagccgcggcgactctgttgccggtcaccacggggtaccggtcgccacgggccgctctgccattactgcaggtcgcccagatgatgttgcgtgtactcgtccgcctgcgcatcgatcgggtcgtaatcgcccgcgtcggcatggtcgataacggccatcgcgttatccaccagtcgcggattgagcgcatggagccaatggatgcgcgggtcacgcccgaaccatcccatctgcttgcgggcgagccgtttggtcttctgcgcgatgtctcggaacgtgtcatccagatcgcacagcccgtccaggtaatcgatgacttgctgatagcccagcgcccgcccggcggtcgctcccagatgggggcggatccgctccacctcttcgatgaaaccaccctccagcatctgcttggtgcggatgtcgatgcgctggtccagctcctcgcggggcaggtccagaccgatctgcactgaggcgatgacgtaccggtagcggggcagactggcggaatacggacgcccggtcacttcgatgacctccaacgcgcggatggtacgacgcgggttgtgggggtccatgcgcgacgcggcctgagggtccttcgcccgcaactcgtcgaacagcgctccggccccctcgctgcgctcacgttcctccagtcgcctgcgcacatcaggatcggtgccggggaacgaaatgtcgtcgatggcggcccgcgcatacaggccggacccgccgacgagaatggggcggattccgcgtgattgcaggtcatggatggtggctcgcgctacctgctggaatctggcgaccgacatggcctcgtccggatcgatgatgtcgagcagatgatgcggaaccgccgcctgctcgtccgcggtcggtttggccgtgccgatgtccatgccgcggtacatctggtaggcgtccgcgttcactatctcggcccgctccccccgttccttcagcgcccgggcgacggcgatgccgaggccggtcttgccggacgcggtcggcccgacgatgctgacgaccctcggcatcgccacggacgggtttgctgaccgatcttcggagcctgacgaggccgggccggtcacgttcgacgccatgtcattattcgtcaatttatcggtcatggtcacatcgttcatggtctcgttcatggtctcactcatgatgtcgtctcgcttatatcgcggtgtctgtcccgctcaccggcggaccgcatacgtctggccggcgttgacatccgggtcggcgatgaggttgtggcgaccggcatgggtgacggtcgcggtcacgaaatcaccgatctgcggcatcggctcgccgtccggcacgccgatatgcaccagcacgccggtccgttcacgaccggtgacgcgatgtgtcgcggaatccttcttgccttgggccccggtaatcatcacttcgacgtcacggccctcgaacttggcgagctcctcttccgtgatctgctcctgaagcttcaccagccggtcgaaccgttcctgcacgacctcatgcgagacctgctccatttcggccgcgggggttccgggacgcggcgagtattcgaatgtgaacgccgactggaacctcgcctgacgcaccacatccatcgtcgcctcgaaatcctcgtccgtctcgccagggaatccgacgatgatatcggtgctgatctgcgcgtccggcatcgcctcgcgcaccttgcgcaggatatccaggaacttggcggaacggtaggagcgacgcatcgcacgcaggatcttgtcggagcccgactgcaacggcatgtgcagctggtgcatgacgttcggcgtctcggccatcgccgcgatcacgtcgtcggtgaacgccgccggatgaggcgacgtgaaacgcacacgctccaatccctcgatgtctccgcaggcccgcagcagcttggagaacgcataccggtcgccgatgccgtaaccgaacgagttgacgttctggccgagcagcgtgacctccttggcgccttcatccacgcatcggcgaatctccgcaaggatgtcgccgggacggcggtcatgctccttgccacgcgtggtgggcacgatgcagaacgtgcacgtgttgttgcagccgatcgagatggatacccagctcgacaccttcgaagcgcgggcgaccggcagctgactggggaaatagtccagcctgtcggccacttcgacctggcaggtccccgccatgcgggcctgatccagcaggcgcggcagcgagccgatgttcttcgtgccgaacaccgcatccacccacggcgccttctgtgcgatcctcttgcggtcaagctgggccatgcatccgccgatcgcgatctgcatgttcggatgcgtgcgcttgaggtccgcccacaggccgatggtgccgtacatgcgttccgcggcgttctcccgcaccgcgcacgtgttcatgacgatcaggtcgacgtccttgtccgccgcctgttcctcggtcgccggcatgtatccgtcatcttcgagcacaccggcgattcgctcggaatcatgcacgttcatctggcatcccagcgtgtgcacgtaaaatacgcccttgccgcgccccgttgtggcgccaagggtcgggtccgtcaatgtggaggtgcgctccgactcggtcatcatgtcttcattcatagtcaaccatcgtaacgattgcccaagccagcaccagcgtgctgcgatttttcagttcctccgcaagagttcggctatgatggtgaaccgtgatacttgaccgacaaagccgcatcaacacgaatgacctgaaaacccgactcgatgccgtgggcatggaccgggggtctttttcaccggaagaactcaccgaattcgtgaatctcatgcaagtctacgaaggcgcgatgtatgagataagcaccaaactggagatccttgattcggagttccaggtgcggttctcgcatgatcccatccatcacatggaacgccgtctcaagtcggtgaactcgatcctcggcaagctcaagcgcaagacgctgccggtgaccgtgtcgtcgatcaaggacaacctgttcgatgtggcaggcatccgcgtgatctgcaactaccgcgacgacgtgtactccgtgtcgaactatctgtcggcgcagaacgacatctccgtgctgcgggtcaaggactacatcaagaaccccaaacagaacggctatcggtcgctgcacgtcatctatgcggtgcccgtgttcctctcatccggcgcccactacaccccggtggaggtccagttccgcaccatcgcgatggattactgggcgagtctggagcacgccctgcgctacaagaccgatctgccggacgcaaagctcgccgagcactcgcagacgctgcttgattgcgcgcggagcctgcagaacatcgagacccagatgcagaacatccaccgcgacatcaacggcgcgccgcaggtcgaggagacaccgaaagccgactaagccggtcgaatcggcccccgtcatgcatcctccgccctcgctgacgggaacggatccgtctgacggccgatcagcgggattctgtctttcttgttttccggtcgcattccccgatcgcgttcactgatcccgttttccggtcttgttcaccgccaatcgtctgcggccgacaccgggcatctgcgcgagcacgatacccgcgaagatcagcgcacagccgaggtatccacgtaccgtcatcgtctcgcccaacagcaatgcgccgccgatgaccgagaacaccgattccagcgacatgatgagcgatgcgcgggtcggcggcacccactgttggcctacagcctgcaacgtgtaggcgacgccgactgacccgattcccgcatacagcacggcgatccacgcctgccctgccccgttccagtccatggagccttcgatcagcgtgccggcccagctgagtgccgcggtcgtcacgaattggatgaatgacagtgtcagcgcgtcgacgcacgctcccagcgtatcaatcgacaggatatgagcggcgaacaggaccgcggtgaacagcagcaggcagtcggccagcgttagggaaccgaagccgtccgtgatgcacagcaggtagaatccggccacggccacgcccaccgccatccaagtcatcatgcgcactgcgcggcgaaggacgagatacgccagcaacggcaccatgacgatgtagagcgcggtgatgaatccggcgcggccggccgaacagccgaacatgatgccgtactgctgcagcgtgctcgccgcgaacagaaacacaccgcatatcattccgacgatgagcgggttcgacagtgcgctgccggcgatcatgtcatgttcgtcatcgccagcctcacggttccccgcgccaaccgtcttccccgattcccggcatcgtcgcaaacgcttccacagcagcaacgggatcagcgagatcgcccccaaggtgaaccgcgtggcgttgaagaacaacggcgacatcgatgccatgccctgcacctgggagacgaacgcgaatccccaaatcagcgaggtcaacacaagacatgccataccggccatttcctgctgcttcatgagcattcacgctagcgtatcaccgtgaccgatcccgaacgatgatggagtggtctcgctgattcgcgcgatgggcatctgaacgatgatggcccatcccgcggctgcgggatgggccatcgcatctgccgtcgtgacaatatccgtattggcggaatcggctatgacggtaccgttccagtgatatcagtctcggctgccgaacagttgaaggatgtacaggaacatgttcacgaagtcgagatacaggttcagcgcgcagatgatggagatcttcttgatcatctccggcccctgggcctcataggcgctgaacagcgcacgggtctgctgagcgtcgtacagggtcatgccggcgaacagtatcaggccgaaggcgcagatgatacgcatcccggtcgtgctgcccggaacgaacatgagcacgatctgggagatgatcagcaccaccaggcccaccatgaggatggggccggccttgagcatgtcgaatttcgtggtcaacgagaacatggtgagcacgaagaagaacgccgcgcacaggaccagggccacgccgatgtcggagatgctgtacaccaggaagatggagctgagagtgaatcccatcagcgccgcgtacacgtagaacatgacacgggcggtcgatgccttgatcttcatgatgcgggcgcccagcgccacggccagcacaacctgtacgatcgcgaatccgaagaagccgatcaggccggttgactcgatgaaggagacgtatgcgccggtcatctgcgcgacgaccgcgacgacggccgtgatgataaggccgagcgtcatctcgccgtatgccctggtgacggatgcccgttgggccgcctgcacctgctcacggctgtagatggtctgggcgttgatcgccgcagtgccgttgggcgcgtatgaatactgtgattgtccgtattgctgctgcccatatgcgggctgctgctgattgccgccgtaatagggatcgccgttgcctggctgctgtccaaatgtcatgctggctcctttgtttgcgtacgcttcatcgtaacggagaaggctgaacaaatcattaatgttcagccttgagcatcacaccagcaacgcctgcctattcgtctatttcaggtcgaacgtgtgcacgaccttccgggagtcatcgatggagaacaggtcggtcacgtcgacggtgatggtcgactcgtccttcaacacgtatcccagggtcacctttcctgtcgctccgggctggatctccgccgtatatgaattcatgtcatatccggtcggctggtcaagatagacggcggtgtccagggcctgtccgttctggaacacctggggatgcgccagcgcggcgaaggagttgttcttgcctgaattgttcttccattcgtacgtgaccatcaccgtaggcttgtcttcatagtcgttgcccgatttcgccgcggagacgatcgtgacatggaggttcttgagatcaccctcctggtcctgctcccccgatgccttggtcgtatcggtggagtcattgttcgtcggatcgttgttcgcggaaccgtcgttggaggaatcgtcgccgctctttttcgcgtcggacgacttgctctgtgacgtgccggaaccgttaatggcctcatcaatggccttgctggctgcggactgcatggccagagtgatgacgatggcgagcaccgacagcaccgccgcgacgatggaaagtatcttgcccgccttcttgccgcggaacgtccccaccatggcgatgatcgccagcaccacgccgatggcgcctaggatggccgctatattgttcacgatcgggataaagctgaggaccagccccaaagcgccaaagacgacgcctacgataccgcagatcgtggttcctttgggggtaccctgtgcggacgtctcccccttgataccgtgcgacatagcattctccttcttgatctcggtgagttatgcaccatccacgctatcggagttcgcacgtttgcatcagtggacgaacgttcatttccgattgccctttcgggcagataagaatgaacccgcgttcgatggcgcggaaagacctgaccccgtagagtggatgccatgaatgatttctcgccccacccccgcgcgggaggaccgctcccggcgacgacgtccgacgaggacaccgtcgccgtgcgcacgcgcgtatggtgcaccgcagtgatgatcaccgtttccgcgttcatgtgcctggtgcagacttcattcgcagccacccggtacatcaataatccggtcaacgccatgtacgtctggttcatcgcgagttccctactggccttcgcgttcccgttcctgctgcttgcacgcgacaagcacccggaaccggtgttctggatctgctgcgccgtcatattgatctttccctatgatccgatgctgatgctgatggcgctcacatcgctgatcgcaagacgccgcggcaggcagcgcatcgtccgcgccatcgtcgcggcgacgctggtcggggtctgggggcagatgcgcgacacgttgcgcccgttcaactcctcgatgtggcaatcggccatcttcatcaagccggattcggatgtcgcctcgagccatgccgtgatgcttgccgggaggccgaccatcatagccacagccgttgtggtggagctgatagccgtcctcatcgccattctggcgggactgtatatccggtcacgagtgcaattggacgaggccgctaccaagacccaggccatcagcgattatgcggtgagcctgcatcgcaatctcaccgatcagcagctggccgacgccatcgcagccgaagcccacgacacgctcgctcattccttgtccctcatcgccttgaacgccagtgccctgcagggcgaggcacgggcgttcatccagcttgccgatgcgacgaacccacatgagacggggcagacgctgacccccgaattgcggaatcaggcttcgcttatcgaggagaaatccgaggagattcgacggcaatccgcaggagccttggatgaggcgcattccatcatcggcatgctccgtcacccccaacaggcacgtcagcagctcgctcccgccccgcaaacgtcaatgacacgcccgtcattggacgccctgatcaacgatgcgcgctccgccggcatgcgcatcaacacctggatagacatccagcagctctccgacctcgatgagggcacagggaaaatcgcataccgagccatccaagaggggctgaccaatgcccgcagacacgccgagggtgagccggtgtctgtggaagtcacgatgaaccccggcaacggcatccatatccacatcagcaatcccatgaagcgcggtctctccgccccgaacgagcgcgaggtcccatccgcaacggacggcaacggacttgccggcctgacggcacgggtgcagacggccggcgggacatgccgatacgggcacgacgaccaccatgtcttccatctcgacgtggcaatgccgtggatcgcctgtcaagccgatagaatgaagccgtgaacgattccgaacagcacgtcatcaccgtgagcgtcatagacgacgatccgctggtgtgccaggcgatgagtatgattctccgcgattactcgcaggggcgtgtctctgtcgtctccacatcaaccgacggagccaccgccgtgcgaaacgccaacagcgagcacccggacgtcgttctcatggatgtggcgatgcccggcatcgacggcatcgagaccacccgtcgtcttcgcgcgcttcgcaatcctcctcacgtgctgatcctcacatccttgaacccgtccaacacggtagaacgctccgtggaggccggcgccgagggattcgtatccaagaccgacgcgccggaggacatcatccgccgcatagtcggcatatgcgaggggaccccgcagttcaatccggccagccagagacagctcatcaatgatctgagcatgcagcggccccagtccaggcgtgacgaggctcgggccctgctggacacgctgccctcccgggagcgcgaagccgtgctgctcgccgccgaaggctgcaccaacgccgagatcgcaggacgcatgttcatatcggaacgcaccgcgaaagcgcatctctccagtgccgcggacaaactcgacatggggcgcgtgcagatggcacggcttgtcgaacgagcggacctgtaacggtgccgtcacgcaagccgccgccagcgcatccataccgacccgctggtacgctgatgctcagcagctaccgatgagggggcgtcatggcaatcaacgcgacggaaaaaccactgggcaaggtgttcactccggactatcagttgtccatcccatccttccagcgcgcctatatatggaaaccggagaacatcctgcagctcatcagcgaccttgaggaggcgtgcaaatcaccggagacgccgtatttcctcggttctctgattctcgtgcgggaaggcgacaccagcttctcggtcatcgacggccagcagcgtctggtctcgctgtcaatcatcatcgccgcgctgcgcgacctcgaacatgacgaggaatggatgcgtctgctggacgctctgatcgtcgagcccggagacaagctgcgcggcatcacctcgcaaccccggctgacactccgtgaacgcgacgccgcatttttccgcgaatacgttcaggaaggcaatctggaggcgctgttcgacatgaacgatgaggactgctcctcgaacgcgcagcgcaacatcatcgccaacacaaagcaggcatacgatgcattggcacagcttgacgaggaggaacgccaccggttcgcatcctatctggtcaattcggtgaccttggtcatcgtcaccaccgatgaccttgatggagcgcatcgtattttcgacgtcatgaacatgcgcggcctccccctgacgccatcggatgtgttcaaggcccgggcgatgtcaggactgcccgccgccgcggtggacacgtacgcctcccgttgggatgacatcatggatccgctgggcgatgacgccgcccgcgtggaggagttcttccggtatctgcatctcatcctcacgcacaagcccgcgacgggcaaactgatcgaggacttcctttccgacgtgctgaaccagtatctcgccggtcattccattgaggcgttcatcgacggtgttctcgccccgtatgccatggcgtggcgcattcttgagcgcccgtcggataccgtgctgccggatgatgttcgaggcaggctggaggcgctgaacgactatcggcatcatgagtggaaagccgtggcgatgtgggcgctgacgcattcgttcaggaacctcggcgaccccgaggtctcgttcttcgcccaacgtggttcgcattcggcacgggacggcggcaggacggccgacccgttggggtcgcatgaccgacagcgcttgggcgagattctgtgcgctttggaacaggtggccggtgtcgatatgctgaatcgtcggagtgccattgaccgtcgtgggcacaccgcagctgcgatccgcgatctggataagggattccctgttcgcttggtacgcggactgtccgtcagcgccgccgaccgggcaggtgccctgatcaggctgcacggcgagttgcagggagaccctgatctggtgcgtctgctgttggttcgggccaacgagcagcgtgccggggctcgcattccgcgcccgcgtgcgctggcggtcgtaccgatcatgcctctggatatcgcgtcggcggcgtcgttctcttcctggacggcggacctgcatgactattggatgtatcgtctgggcaatatggtgctgatgcaaggcaaggaggggcagatcgaccggctcacggagtacgggcgccgtcgcgaccgcgtgctgctgcgtgccgactcctgccgtttcccgctgaccaagcagattgccgacttcaacgaatgcacgccggcgatgctggaataccggcagaaggagacgattcgcctgcttgccgaatactgggacatccgttatgacgagagccatgccgatctgacgagcaaacccccggagcagctttccggcgacgcaggctcccggcagacgcgcggttcacagcgtgtcaccatcaagcaggtcgtcgccgccggtctgctgattcccggcgagactttggtatgggagcgaccgcgcaagggcgaacgttggctggtgaccgtgacccaggagggacgcttccgtcttgaggacggctcggaatatgcgtcgcccacggccgcggcacgcgcggcaggcggtcgcagcgccggattggatgtgtggaagcgtacgtcgaacggcgaaaaactcagcgatatctggaaagcctaccgtctgcgcacccgctagacgcctggctgccagtccacgaccacggcacttcgacaagtccgccattcccatatccctcacccggccatgatcccacatcagacgacataaatgggactgtgggcggatggaagatgatgcgtataccgaaaaagtcccatcgcagtgcatgcggatgggactctggctggataaggggcgcataatacagcggcaacaaccagcggcaacggtccggcagtcagatgtgccgctcggcggtcactccgtgatgccgtattcggaggcgatgacccgccacaggtcctccgccgccttatcgacatcatcattgacgatggtgacgtcgaattcgttttcggcggagagttcgacatgagcggtttccagacgcttggcgacttcctcgggagtttcggtgccgcgtcccttgagccggcgaacgagctcgtcgaagctgggcggggcgatgaacacatagacgacttcgagaccgagctccttggcacgctgcttgacgcgtcgggcaccttgcaggtcgatctcaagaatggtggggacgccttcggcgaggtgttcctgaacgggcttgaggggcgtgccgtagcgggccaggccgtggaccgtggcggtttcgagaaaatcgccggcctcttccttgtcggtgaactgctggtcgtcgaggaaccagtagttgacaccattgacctcgccgggccgcggcttgcgggtggtggcggacacggagacccagacgccgggatggttcttgcgcaggatgttctcgacggttcccttgcccacaccggcgggaccggtgaggacgacgaggcgcttgcgaggtgtgccatcatcgtcgggagtggccgccggctcggccggggtctgctgcagtgatgcggtaatggttcccataccgtctttctccttgtcctcgccttctttcatggcttcgtagagcgcctgccggacgtcgatggcgatggcctcggtggcttgggcaagcgcggaaatatcgggcccatgggcagcgatgaaacgggatacggtcaccagaacgttgcccttggtgcctttgaagacggttttgaggtccttggcctcggcgccctgccagccgtagcccggggaaaggatgggaccggtgaatttcgccgggtcgacaccgctgtcggcgatccactggcctatggtggcgccgatgatgagcccgaccgagcccataccgtcgatgtcgtcattgaacttctgggcagtgctggcgatgccgaacgccacggttttgcccttgaagtcgccgctctggcggatggccgtctgcatgctggcgccttcctgattggaggtcagggaggcgatgaagacgccgcgaccgttgttgagggcctcattggtgaggccccgcagtgagcgtgcgccatagtatggcagcagggtgatggcgtcggccagcagaggggcgcccggcttgaagtatgcgtccgcgatggcggagatggtggtggacaggcctccatggaggcagtccacgatggtgatgatgcccatttgacgagcggcgtagagcactcgttcgagcgccgcgaatcccttggacccgtaacgctcgaacatgggctcctggaatttgacagcggcggcgcgatctcgcatggcctgaagcatgcgcatggagaacagctccgcgccttccgcgtcgacgttatacccccagtcagtgaggtttttcctgtgcgggtcgatgccgacgcacaaggggccgtactgggccatcgaactgctgaggcgcagtccgaaatccgaccgcatggccttgatttcttcctcactgctggcgtgtgtcatgattgctcctggcctaacttattcctggctctccaactcgaacagctgcttggcgtgctcctggatgctcatgatctggtaatcgttgtgcttgacggcttcgatggccatcagcacggcggagaactcggtcatggtggtgaactggggcaggtcggccgcgatggccgcagcgcggatggaatatccgtcggaacgcgatccccgggaattcggcgtgttgaggatcatgtcgatcttgccttcttcgatgagctcgaccacgttctttccgatgccaccgacggcgtgctcgaccttgacggccgcatccgggtcagagtcgacgcgggtgctgatcttgtcgacgatcttcgagtcgatgccgtaacggcgcagcacggacgcggtgccctccgtggcccagatggagaatccgagctcgaccagacggacggccatcagcggcagctgccgcttgtcggtgtcgttgacggagatgaagacgttgccgctggtaggcagtccgccgtcgtatgcggcgagctggctcttggcgaaggcgtgcgggaagtcacggtcgaagcccatgacctcgccggtggagcgcatctcgggtccgagcaggatgtcgacggtcttgccgacgggcgtgcggaagcgcttgaacggcagcacggactccttgatggcgacctgctggccacggtggatgtcaccgccgtcacccttgggcagcagcaggccgttggcccgctgatcggcgatggtctcccctgccatgatgcgggcggccgccttggccagggccacgccggtagccttggatgcgaacggcacggtgcgggaggcacgcgggttggcttcgatgacgtacagcgtgttggccatgaaggcgtactgcacgttgatcaggcccttgacaccgcagcccttggagatggcgtaggtgccttcgcgaaggcgacggatctggtcgtcggacagcgtgctcggcggcagcgtgcatgcggcatcgccggagtgcacgccggcctcttcgatgtgctccatgatgccgccgatgtacagctcttcgccgtcgaacagggcatccacgtcgatttcgatggcgtcctgcaggaacttgtcgatgagcagcggggagggcaggcgtccggacacgaccgtgtcggccttggcctcgtcgagcgcacggttgacgtacttggtcaactgggcgtcgtcgtagacgatttccatgccgcgtccgccgaggacgtaactggggcgcacgagcaccggatagccgatgttgtgggcggcctcgcgggcctcttcaagcgacagcgcggtgccgtagcgcggcgcgttcatgtgctcgcgacgcagcacctcaccgaacagctcgcggttctcggccaggtcgatggactccggggtggtgcccaggatcggcacgccggcggccttgagtcgcgcggccagcgacagcggcgtctggccgccgagctggacgatgacgcccttgaccgggcccatcttcttctcggcctcatagatctccagcacgtcctcgaaggtgagcggctcgaagtacagccggttcgacatgtcgtagtcggtggagacggtctcggggttgcagttgaccatgatcgtgtcatagtccttgccgagctcctgcaccgcgtgcacgcaggtgtagtcgaactcgatgccctgaccgatgcggttcgggccggagccgaggatgatgacggcctcgcggtcgcgcttgcgcagctcggtctcgtcggcgtagcaggagtagtagtacggcgtgaccgcgtcgaactcggcggcgcaggtgtcgacggtcttgtagaccgggcgcaggccgtaggtccagcgcagctcgcgaatcgtgttctcgccctcgtcaccgagattgcgcaagtgggcgatttgcaggtcggacaggccggcgagcttcgccttcttcagcagcttggcggtgagtttctcggcgtcgcgcacttccatcgcggtctggttgatgagggccagctgcttgacgaaccacgggtcgatcttggtggcgtcgaagatctgccgttcggtggcaccgccccacagagcgcgctgaatctgcagatagcggtgctcggtcggcacggtgatggccttgagcagttcggcgacctcggcctcgtccggcttgtcaccatcccagctgaagcccatgtggcgcttgtcgatggagcgcatggccttgcccagcgactcctggaagttgccgccgagtgccatggcctcgccgacggacttcatcgacgtggtcagacgcgggtcggcgccggggaacttctcgaacgcgaagcgcggcaccttggtgaccacgtagtcgatggtcggctcgaaggaggccggcgtggactgggtgatgtcgttgcggatctcgtcgagggtgtagccgagcgccagcttggtggcgatcttggcgatcgggaagccggtggccttggatgccagggcggaggaacggctcacgcgcgggttcatctcgatgacgatgatgcggccggtgtcggggtgcacggcgaactggatgttgcagccgcccgtgtcgacgcccacgccgcggatgatggcgatgccgatgtcacgcagcttctggtattcgcgatcggtcagggtgaagcagggggccacggtgatggagtcaccggtgtgcacgccgaccgggtcgacgttctcgatcgggcagacgaccacgacgttgtcgttgcggtcgcgcatcagttcgagctcgaattccttccagccttcgatgccctcctccagcagtacctcgtcggtcggcgagtaatgcaggccggcgccggcgatgcggtgcagctcctcctcgtcgtgcgcgataccggagccgaggcctcccatggtgaaactcgggcgcaccaccaacgggtatccgagttcggcggcgacggcgtccacttccttcatggagtgggcaacttcggagcgcgcggattcggcgcccgcctcgtcgacgaccttcttgaacagctcgcggtcctcgccgcggtcgatggcgtcaagggaggcgccgatcagctcgacgttgtacttcttgagcacaccggcctcgccgagcgccatcgcggcgttcagtgcggtctggccacccaaggtgggcagcagggcgtcggggcgttccttggcgatgatctgctcaaggatgggcgtggcgatcggctcgatgtaggtggcgtcggccatctccgggtcggtcatgatcgtggccgggttggagttcacgaggatgacgcggatgccctcttcgcgcagcacgcggcacgcctgggtgccggagtagtcgaactcggccgcctgcccgatcacgatcgggccggagccgatgaccatcactgacttgatgtcggtgcgtttaggcattgcggttttcctccttggacgtcttcatcagatcgacgaaacggtcaaacagatatgcggcgtcgtgcgggccggccgccgcctcgggatggtactgcacggagaacgcggggatgtccacgcactgcaggccttcgaccacgtcgtcgttcagatcgatgtggctgacgaacaccttgccgaagtgcccgttgtcgaacggggcgtcgacggtctcgccgataggcgcgtcaaccgcgaagccgtggttgtgcgcggtgacctccaccttgccggtggtcaggtccttgacgggctggttgatgccgcgatggccgaacttgagcttgtaggtgccgaagccgagtgcgcggccgagcagctgattgccgaagcagatgccgaagaacgggtagccggcgtccaggaccttgcgcagcagctcgacctcggggtcggcctgctccgggtcgccggggccgttggagaagaacacgccgtccgggttcagcgcggtgagttcctcgaaagtgatagtggacggcacgacgtgcacgcggcagccgcgctcggccatgcgatgcggggtcatgcccttgactccgagatccacggcggcaacggtgtagagcggctccttgccctcgtactcgccacacggctcgaccgtatacgtctctttggtgctgacctcgtcgtacaggctcagacccttcatctgcggggtggccttgacctcgtcgatgagcgcggcgacggtcttcaggcgcccttcgtcgtcgagcagtgcgtcaccggagaagattccggcacgcatgacgcccgcggagcgcagatggcgcaccagcttgcgggtgtcgatgtggctgatgccgacgatgtgctcggcgacgagatcgtcgtcaaggctgcccgtggcccgccagttgctgacggtggggctgggatcgcgaaccacgtatccggccacccagatacgggaggattccggatcctcccggttgattcccgtgtccccgatgtgcgggaacgtctgcaccacgatctgccgatcgtaactgggatcggtcaaagtctcctgataaccggtcatgccggtcgcgaacacgatctcgccagtggtcttgccgatcgcgccgtaagagtcacccacatacacttgcccgtcctcaagtacaagcacggcgtcatcaggggcaaaactcacggtttcggaatcaatctggttcaccaaaacccccttattttctcaggatattcgtaccaaccttaactgtcggcggggacgcgccccaccggcaattcggctggtttctcgtcatttacttgtggactcgccgtcctgctggccggcttgtggatcggccgtctgctcggatgcagcttcggcaacgtcatcggatacatcgtcgaacgtcatgtcgtcgaaatcgacgccgtcggcgatgtcatcgtcctcggacgcttcggaatcgccggtttcggcttccgcatgcgacgcttcgccggcaggctcaccaggctcttgaccgtcgtcgctcggctgtgcgtcgggctcgtcgttttcggggtggagaatggcctcgcgtccttcggtgtcatcgcaaatcgcgctgagcaggccgtggatgaacgccggggagtcgccgtcgctcaacgtcttggccaggccgagcgcctcgtcgatggccacgcgatcgggcacgtcgtcgttgaagatgatctcccatgcggcgatgcgcaggatattgcgatccacgacggccatgcggcgaaccttccacccggtggaatgctcgttgagcatgtagtcgatctcacgccggtgatcggcgacgccgcgcacgatctcgatggcgtagtcgggaagcggggtctgcgcaccaggctcttcgatgcgctcagcaagaagggacaggaaatcctgtcccttctcgtccgcctcatacaacgtgttcagagcccttttgcgagcggtggaacgtgccatggaagcctgttgtccttactctcagttctcgcggccgaggtaggagccgtcgcgggtgtcgaccttgaccttctcgccttcgcccacgaacagcgggacctggatctcggcgccggtctcgacggtggcgggcttagtgccggcgttggagcggttgccctgcaggccgggctcggtgtgggtgatggtcaggatcacggaggccggcagttcgacgctcagcggggtgccgtcgtggaacgacacgacgcagtcggtgccttccagcaggaacttggcctgatcgccgacgagggtcttggggatgtagacctgatcgtaggtggtcatgtccatgaagacgaagttgtcgccgtcctcgtaggagtactgcaggttgcggttgtcaacggtctcgaactccatcttcatgcccgcgttgaaggtcttgtcgacgatcttgccgctcagcacgttcttgatggtggtacgcacgaaagctgggcccttgcccggcttgacgtgctggaacttcgtgacggtccacagctggccgtccaggttcaggacggatccgttcttgatgtcattggtagtctgtgccacagtaactcaccttttcatgttttcaatttcggcaaagctcaaaaatagccttgtctattatgccataccgtctatacagcgcgtcgcggccgaacaatcccccaatggcatcttccggctgcatcagctgttcctcatgcaattgaaacggaacaagcaatagtggttaacgacaattcacctaatgacttagtagctgaataacgaacataataatgacaatgacgacatgtcggctgaaccgataggagacaaccgacatgacgccattctcacgtaatcaatcgatgcagtttatagtgttgatgcaaagaacggaatcaagcatgtggtctgaaacacgaacctgcggcgcgaagatacgcgtcgcgcactcattgacgtctggcagtaattctatgcacaggcaatgcttcgcctcaacatatccttcctgcctagtcgacttacttggtaacgtctcgacttcggtatccataatcattcgcctcctttcactaacatagtgttgccgcatttattacaccgctgtgtttacagacaaccagtttccggccttcttctggaagttacatgtctcgcttcctcctcgcgactacgaaagacacattcaatcaatagttgacttcttggtgatgagaaaagtcgatttcaaattgccggatatgacgttccctcaaatactattcaacagcaattggaatcgtgcatacaatatctgacgttcaaaagggaagccctcatcccctatgggtggaacgatacagcagagcatcctgtatatggagatgacgtcaacagtctcttcgatgtaatcgaactattcatatcaacagaaagaagaaaaaaccgtgactgaaaaacgtcaggaaaaagaatcaacaatctcaccatggagggtgagggattaccggtcctggttcgtggctgacactgcgtcagcactgggaaccacaatcggcggatttgcgttcacgctggtggcatatgcggtaagccatgatgtaactacggcaggtatggtcggcaccgtgttcgcactgtgcgaaggtttgggaacacttccaggcgggcacctgtcggatagaatcgatcgcaagaaactcatgattgttttcggtcttatatcggctgcaacactgtgtgtgatgacatcggccctggttgcgaaaatgatgtcggcccctttgctattcctgtttgccattgtacggggactcacttccggtgtgttttccaatgtgtccaatatcatcttgcctcaaatcgtcaccgggaatcagctggtgcaagcctattccgcgaatgaatcgcgcgatgcatgcatccaattgttctccaaaccgctgtcagggttcctgtacggattaggccccgagattccattcctgatcagcgccgtcctgtatgcgctgatgtccgttgcgactccgctgattcgttcggatctacggcccaagaacgacgcctccccatcggattccgatgattccacgaagaaaacaccacgaaaccacattggcggcagttcatcgcattcatcgttgatcgaaggctttgcatggtacacgcgatggccacaagcagtatccgtattcggcagtgtgctcttgttgaattgtgtcctcaccctgatggtcagcattgtgattctgaatcaacagatgctgaacattcccggctggcagattgggctcatctcaaccggaagcggtgtcggactgctgagcgggtcgtttctgaccactccccttgccaaccgtctgacgggaggcagaacagtacaagtctccttcatcatcatcatggtaggatgcgctttacagccattcacccagaatacatatctactggccggatgcatggcgatcatgaatctcatggtcgttcctgccaattccgtccttggtgcctacgcgtcgctgatcattccgaatgatttgcgtggccgcgtgttctcagtgttctccttgtttaacatcacgcttgcctcattggcgtccggtattgcgggaatcatgctttcctctctggggtacatgattgcggcggcgaccaccgccgcaatcatgacaggtaccgtattactggccttcatgagtaacggtattcgtgaaatacctgacaaggcggctttctcgaaccttgaaccgtggcgctgactactctcgcgatatccgcagccgcctacccgcaatgaggacgagccccgacgtgagagtcacagccgcgagcatgaagaccgccgtcacggccgcgcccgtgtgagccagccggacggtcgatccgccgagacccgcacctgaaggcctctgaatagttgcaccatgctgctgcccatcgccgttgctcgggtcggcgacaaacactgaccggtcgatctgcacgttgacgattcgcgtcgtctctgtggtgtcgaagttgttgtcggtgagcaggctcagatcgagccggccattgtcgtccgcatgggtgatgaccagatcctcgaagttgtcaagcagcgggttggcgtccgtgtattgcgcattcggcttgaactgggcgccaagagtcagcttgccgccgaaatcggcgagttccgtgaccggcaggaacgacgagtcggcgctcttcgacagcgacgcgacatcggagacgtccggggcggccgcgatgccgtgcgcatacgcaagcttcatgccgtacccatgggtctggtcccaggagcgttccagcaccaggaatccgtcctcgccgatcgccgcgaactcggtgatgcccatgttcacgtcggcggccttgaacgccacctgcttgacgagcttccactgtcccttggcacctttcacgtcgtcacggtagaccagcgcgcggcgggctgtggtggcgatgtccttgccgctgggcgaatcgttcttgagggcgtactcgttgccaaccacgatctgatggccggacggcgataccgtcagcgcttccaggctcttgttgtgcacggcctgtcccctgcagttgatgtcgaacagttcaggcacgggcaactcgttcttctgacggccgtcgatgccgaagatacggatcttcggctgctcatgctcgccttccgccgcgttcggatggccttcggaggtgagcaggaagtcgccgttcggcagcacgccgagcccctcatcatcagtggtttcgccgttgtatggcgtaccgttctcatcggtcaggacgatgctgccggtcggagccgccttgtcgagatcgttgcccagcagccataggcgagcgacatcggtaccatgattgtccattgcggacacatattgtccgagcttcctgttgtacgccgtcgaggacagtccgccgaacgctatcggctccgacgtgccggtgccgtcgctgaatccgttagccgaccagtagtcaaggcgatcgtttctgccgagtgccgtgacgtactgtgacaggcgaccgcttgccgagtcgtcgaatcctgccgccgtcttctggaacggttccgcttcgacatcgaggatgcgcgtggtctgggtggcgctgtagttgtcgtcgctgatgatggagatagcggccttgtattcaccgtcaccgcgataccacgaggcatcgggagtggcgagctggtcgaggttcgtgatgacgagcccttcgtagttatccatcagagggttcgcctgatgagcgccgggtttcgcggaggcgcccagatccggcaacttgtccagctcgccgatctggcgggatttcacgaactcggatgcattcttcgggtcgttgaggttcgccacaccggaaacatccggcgcgccattcagcccggagacgtacgagagcgccaccttgttgccggtctcgctgttccatgaacgttgcaggacgtacagggagtcttcggaatcgaggacgatatcggagatgtccagtcccggtaccgtgtggaagcccacctgtttgacgagcgtccactggccggccttgcccgtcacgtcgtcacggtatacgaggaagcgccgcgcgtcgctccggttctggtagacgtcagacttgagcgtgccttccatggccgatacgagttcgtgccctgtcggagacaggctcaatccttccagcgtaaggttatgcgacgcctgacccttgggcgtgttgatgtcgaacagctgcggaacctcaagctcccccttctgccgcccattggcgtcgaagatcctgattgtcgggtgttcggcctgattcctgcccgcagggggaatgccttccgagctgatggcgaaatcgccgtcgggcagcaccgctatgccctcgttgtccgtcgtgttgccgttatagggcgtcccattaacatcggtaaacgtcaccggatcacgcgtgatggacaggttgtgcaggtccttgccgaggaaccacacccgagattcgtcactcccatggttgtcggattgcgccacatatgaatccgcggttttgtcccacgtgagacccgacagtcccccgactcgaatccccttgtaatcgagcttgtccagcgcatcgctgtaggcaacggccttgacctgattctgtgcgccaatatcagtcgtgccctcggctgataccgctggaatcatgacggatacgaacagcatgcatgccgtcgccgtcaccgcggctattctcttgttcatggttttcccttccgaacgttaccgttcacatggccatgctggctctgcaaggtatcgggaaggggaataatcacgcgtctgcagatgaaccatacatgaaaagacggcgacatcgttgtccacctgtatggaattcgcctgtatgggtccctggaatacgaaagtgggtcctgaaacctcaagcaaggtttcaggacccactcagaacgctagttcaagcgtgtcgagttcttcgctgatgggaatcaggcgaggatcttggtgacacggcccgagccgacggtgtggccgccttcacgcacagcgaaggtcaggccctcctccatagcgatgggctgaatcagctcaacggtgaaggtcgcgtggtcgccaggctgaaccatctcgacgccttccggcagctcgatgacgccggtgacgtcggtggtgcggaagtagaactgcggacggtagttggagaagaacggcgagtgacggccgccctcgtccttggtcagcacgtagacttcgccctcgaacttggtgtgcggggtgacggagcccggcttggccacaacctggccacgctcgacgtccgtacggttgatgccgcggagcagcagaccggtgttgtcgccagcctcgcaggcgtccatggtcttgtggaacgtctcgatggaggtaacggtggtggtctgggtcgggcggatgccgacgatctcgaccggggtgttgacggccagctggccacgctcaacacgaccggtgacgacggtaccacggccggagatggtgaagacgtcctcgataggcatcaggaacggcttgtccaggtcgtgaaccggggtcgggatgtactcgtcgacggcgtccatcaggtccttgacggtctggacccacttgtcgtggtccggagcgtcatcgtgcagagcgccgtaggcggaggtacggatgaccgggcagtcgcggtcgaagccgttctcgtcgaggaggtcacggacctcttcctcaacgagctcgatgagctcctcgtcctcgaccatgtcgcacttgttcagggcgacgaggatacgcgggacacccacctgacgggcgagcagaacgtgctcgcgggtctgggccatcgggccgtcggtggcggccacaacgaggatggcgccatccatctgggcagcaccggtgatcatgttcttcacgaagtcggcgtggcccgggcagtccacgtgagcgtagtgacgcttcgcggtctggtactcgatgtgggcgatgttgatggtgataccacgctgctgctcttcgggagcggcgtcgatctggttgaagtcgtactcagggttcagatccgggtactcttcgtgcagcaccttggagatggccgcggtcagggtcgtcttaccgtgatcgacgtggccgatggtaccaatgttaacgtgcggcttagtacgctcgtacttttcctttgccatgtaattgtcctcctggacgtctcgtgtagttggcttgcgcttgcggcacaagacactcgctacattgtactgggtttctgggtttcttgccactttggagccagaacccagtcagcggtatatgattttaccgctgactggagacacttacggcttcaaaacagctgcgcgtgtcactccccgcgctgggccttgatgatctcgtccgagaccgacttcggcacctcggcgtaagagtccatctgcatggtgaacatggcgcggccctgggtcttggaacgcaggtcgccgatgtagccgaacatctcggacagcgggaccttggcgtcgatgaccttgacgccggtggcatcggtcatggactggatgttaccacgacgctggttcagatcgccgatgacgtcgcccatgtactcctccggagtacggacttcgacggccatgatcggttccaggatgacgggcttcgccttgggagcggcttccttgaacgccatcgaaccggcgattttgaaggccatttccgaggagtcgaccgggtgcatctggccgtcgtagaccgtggccttgacgccgaccaccgggaagccggcgagcacgccggattccatggcttccttgacaccagcctcgatgggtccgatgaactcggcgctgatgtggccaccagtaaccttgttctcgaactcgaaggtctcaccggcctcggtgtcgaggggctcgaagttcatgaacacctttgcgaactggccggaaccaccggtctgcttcttgtgggtgtagacctcgttgagcacgggcttgcggatggtctcgcggtaggcgacctgcggcttgccgacgttgcactcgaccttgaactcgcggcgcatacggtcgacgatgatgtcgagctggagctcgcccatacctgcgatcagggtctggccggactcttcgtcggtggtgacctggaaggtcggatcctcgtcggagagcttcgcgagggcgatgcccatcttctcctggtcggccttggtcttcggctccacggccacctggatgacgggatccgggaaggtcatggattcaagggagatcggggccttctcgtcgcacagggtgtcaccggtggacacgttcttcagaccgacgaacgtgtagatgttgccggcttcggcggcgtcgaccgggttctccttgtcggcgtgcatctggaagatcttgccgatgcgctccttcttgcccttggtggagtcgagcacgttgtcgccgggcttgacggcaccggagtagacgcgcacgaacacgagcttgccgtagaacgggtgggtcgagatcttgaagaccagggccgcgaacgggtcggaggtcagcggcttgcggtcgatctcgacggactcgtcgcccggcttgaagcccttgatggacggaacgtccttgggagacggcaggaagtcgatgacggcatcgagcatcggctgcacgcccttgtccttgaacgcggaaccgcacagaaccgggtacgccttgcgctcgatggtgagcttgcggataccggcgcggatctcgtcctcggtcagttcgccggactcaaggtacttctcggtcagctcgtcgctggcctcggcgacgtcgtccagcagctgagcgcggtattcctcggccttgtcctgcaggtcggcggggatgtcgacggtgtcgtagtgggcaccctgatcggtggagacgtcgttccagacgtacgccttcatgcggatcaagtcgacgacgccggcgaagtcgttctcagcgccgatcggcagctgcacgacgagcggcttggcaccgagcttgtccttgatggtctgcaccgagaagtagaagtcggcaccgagcttgtccatcttgttgatgaagcagatgcgcggcacgccgtacttgtcggcctgacgccacacggtctcggactggggctccacgccttccttgccgtcgaagacggcgacggcgccatcgagcacgcgcagggagcgctcaacctcggccgtgaagtccacgtggccgggggtgtcgatgatgttgatctggaacttttccttggtgtcgtgggactgacggttccagaagcaggtggtggcggcggactggatggtgatgccgcgctcctgctcctgagccatgaagtccatcgtcgaagcgccgtcgtgggtctcaccgatcttgtagttcttgccggtgtagaagaggatgcgctcggtggtggtggtcttaccggcatcgatgtgtgccatgatgccgatgttgcggatcatgcgcagatccgtaagcacgtctagtgccattgctgttccttgctctcgatctcgaaattaccagcggtagtgagcgaaggccttgttggcctctgccatcttatgagtatcctcgcggcgcttgacagaagcaccgaggccgttggaggcgtcgaggatctcgttggcgagacgctcggccatcgtcttctcgcgacgggcgcgggagaagtcggtcagccagcgcagcgacagcgtgttggcgcgggcgggcttgacctcgaccggcacctggtaggtggcgccaccgacacggcgggaacgcacctcgagggacggacggatgttgtcaagagcgcgcttgagaacggcgaccggctcctggtcggtcttctccttgaccatgtcgagcgcggagtacacgatgtcctcggcgatcgacttcttgccgtcaagcagaatcttgttgatgagctgggccacgacggtcgagccgtagatcggatcgggcagcagctggtgcttcttagcaggtcctttacgtgacatttctcttacttcgccttctttgctccgtacagggaacgaccctgcttgcggtccttgacaccctgggtatcgagcgcgccacgcacgatgtggtaacgcacacccggcagatccttgacacggccgccgcgcacgagcacgatggagtgctcctgcagattgtggccttcgcccgggatgtaggcggtgacttcgatgcccgaggacaggcgcacacgagcgaccttacgcagagccgagttcggcttcttcggggtggtggtgtagacacgggtgcacacgccgcggcgcagcgggctgcccttcagagccaaagtcttcgacttcttcggctttgcctgacgtcccttacggacgagctgttcaatagtaggcaacttgaattctccgattcagtggtttcttccttttcgtgaagccgccgcactgcagcccacgcccacgaccatgaatcgtcataagcagccacagtccaccggcccgatggcccgtatctctttcacagtccgcattgctgcgcgcgatccaatcaagatccgggatatcccagcgcgtgctcctatcacataaggcgcaccactggcacacacaagtatctatattacttccaccgcggacaacgacacgcttgtcgtgacggcagacaagacaggcagataaacgaaaaccctccgcatgggagggttttcagtggggtggataacgcggcttgaacgcgcgaccttctgaaccacaatcagatgctctaccaactgagctatatccaccatgtgagtcgttccagcgaactggattaacgcaacagagggatactatacacgaaatatcaagccgcgtcatcgcggcgtgtcgcgcagccgcccagtatcattcactgcgcgattttgtgcgtttccacctcgacagacgggcgatatgttcacttctgtgcgattttttgggcacatgaaaacacctgcaaacattatgttttttacggtcttcaaacttgaatatgttcgtttccataggtacaatgaaacacgaaggccggagttgttatcagcaggggaatcccgttgattgcaatgaagcgcacaaagcagtagcgcaacgtcttcacgataattaaataccgaggcaaacagaaacaatgcagcacgcaagcgaagcagtgcgaagcgacacgatgatgagtacgccatcagaagacatcgccatacggcaacgacatcatcgttcggtgacacagtgtggagcgtattacgctgagcagctcagcctgagatatccgcggtagttgtgagccgcagacgggaagagtacaacagcgaagaggcagagaatccgcagagccggcaacgcagctacggccgcagttgacgaggaagcggcacaatgccggctctgctgcaacgtgaccacacctttcataacagaagagactcctttcgcaagggcgccggatgctgatccacatccggcgcccttgtttatggcgcgcggtctgcggaacgcggcctgcgtcacgcggccgtacatgacccatgcgcggtacactcgctacataccctgatgcatccgcaccacgacacagcgcgacaaggagccgacatgctgtctttcggaaacgattattcctatggggcctgccccgagatcctcgaccgtctcgcgcggaccaacgacacggcgttccccggatacggcagcgacgcggcctgcgaagatgccaagcgcaggatccgcgaagcatgcgagacgcccgacgccgacgtgtggttcctcgtcggcggcacgcagaccaaccagaccgtgatcgacaccatgctcgccccgtacgagggcgtcgtcaccgttgattccggccatccgaacgtgcacgaggccggcgccatcgagtcgaccggccacaaggtgatcacgctcccccatcacgcgggcaagctcgatgccgccgagctcgacgactattgcgccaccttctatgccgacgacaaccacgagcacatggtgttccccggactggtctacatctcgcaccccaccgagtacggcacgatctacggcaaggccgagcttgaggccatcgccgagaccgcccaccggcacggcatgccgctgttcgtggacggcgcacgactcggctacggactgaccgccgccggcaccgacgtgacgctgccggacctcgcccgcatcgccgacgtgttctacatcggaggcaccaaggtcggcgcgctgttcggcgaggccgtcgtcttcaccaagggcaatacgccgaagcattttctcacgcagatcaagcagcacggcgcattgctggccaaaggttggctgctcgggcttcagttcggcacgctgttcaccgatgacctgtacctgcgcatcgcagccaacgcgaaccggcaggcggaccggatccgcgaggcgctgcgcgagcgcggctacacactgaccttcgaggcgccgacgaaccaggtcttcgtcaccttggaccatccgaccatcgaacggctgcaggcccatgtacgcatgggcttcatggagaaggccgacaacgagcatacggtgatgcgcctgtgcaccagctgggcgacgaccgacgagcaggttgaccagctcatcgcgttgctgtgaacagccgcgaggccgacgccgggcctaggccttcgcgtcggcgatggcctcgcgctccatggcgacgaacttcgcgaccgacgcctcgaccgaataatcggccttcgcgtgttcggcataccgtccgccccaaacggccagctcgtgcggatgatcgatccaccaatcgatgcgccgggcgagcatcgccacgtcgtgagccgggaacagggactcgtccaacaacgcgaactggctcgccgcgctcaactcggcggatgcgatcacgggcaccagccccgacgccatgccctcgatgacgctcaacgattcgatgtccacgatcgacggatgcacgaacaggtcacatgagcgcagcagcgccggcatctcggcgttcttgtggaacccgatttgcgccttgcgctccagaagccggtcggcgcggaaccgcaggtaatgctgcaacggcccggttccgcagatgatcagttcgatgtccttcgcgtgacggcagcgagaaatcgccttgatcaacgtgatctggtccttctcatgggaaagacgccccgaggcgacgatgcggaacggcaccggcgcgggggctccgtccgaacgctgccgtttgggggtgaaccgcggcacgtagccgtttgatatcacgtgcagcttcgccttgtacccgtgcgcgcgcaactgtccggcgatcatttcggtgggcgcgtggatatggccgatgcgccggtacagccagaagcggaacagggcgtacagaaaacccgacatcccaggcaggtatttcagcggaccggccgaatacatgacattctccggctggaggtggaatcccgcggtcacgggaatacccatgctccgcgcgaccttgtacgcgcaccgcccgaacttgaacggcagatacagatgcacgacatccgctccggcgaacgccgtgcggaacagcgtatcgcttggcttggcgaactgcatttgttgtttggcggccacccaggagaccagcggcaccttgttgacccgtgccggatattcgggggcgccgatgccgacgagtctgacatggtgaccctgccgctccaattcgtgcgcatactgcaatgcggagttcgacgtgccgttgcccttgttgccgatggtgtccatgaccagcacgatggtcatggggcgatccaagaccgacctgtcctgggggtgcggttcttcgttcttgttgtctcgcattgtttcatcctatctcgcagtctcgcgaatcacgaccgagacgcgcacggtggccggccacatgccttcgccgcatgtctccatggccgcgtcctcgttgacgcaatgtactcggcctcccccccctgaacgttggcccggcgcgggttaaccgcccggtaagaactattgtcacgcgggcggattgccgacgcaagcgtccggtcatacgggaaatctatgaccgcctatcatgacgaacgatgccgacgtccggaggatgtccggacgtcggcatcatttaccgacatgccgttcctcgagccgtgcgatacgtgcccggagaacggtttgccgtcaggactcgcgcctcttgcgccccgtcagcgcgcagccggcggccatcatcgagaccgcgagcacgccaaccggcacgatcgaggcgccggtcgcggcgatggactggttcttgtccttgccggcgttcttgtcggcatccttgtcggtgttcggcttctggccgtcgcccggagtcgtcgtacccggctcgtcgcccggatccggattcgggttgggatccgggtcaggatcaggcttcggcgtcgggtcaggatcgggttcaggatcaggcttcggatccgggtcgggatcggctttctccgccaccgtgaccgtcaccgaggccgtcaccgacggcaccgcgacggatgcgacggtgactgtggccgtaccggccttcagcgccttcaccgtgccgtcctcgccgacgctgaccgcgtcacctgcgaccgtccacgtgaccgactggtcgacggcatcctcgggggtgaccgtgacaccgagaccaacgctctggccgacggtcatgtccagcttgccgtccttgactccctcgccggtgacggcgaggccggtgacctgaggcgcctccggcatctcaacgccgacgaaccgggcgtccgcccaatccgcgtgatcgccccacgtctcgctgcccgcgccgacggccagcgtgatggtcttggcgccttcggggatgtcgacggagaccttcgccatcggcgtgtcgtgctgcatcgccgtcttctcgaagacgacctcaccatcgatcatcacctggaagtcgacatttgcgtggtcgcggtcgacgccggtcagctcgcggtccacgccgacgtacgcctcgaagcggatcgccccgagatcggacacgtcgtacacgatgcgcgaggccgcgtgggtgccgatgcccttgtcgaacgtctgctccttctcgccgtcccacagcgtgatcgtgttgttgccgcagctcttgtccttgcgcaccgggttggtgttggggtcgccggacgtggccgactcccacgccagatcggaggcgtagacgctgtccgtgccggtcacggcaaccttataggagacggtgctgccgccggacgtgacgtccagctcgaacgtgttgtcgccctggtatacggtgacgtcccgggtgaggcttccctgctgcgcatcgccgactgggaccctcttcgagccgttcacccgcatcagctgcaatgtggcagtcgggtcgaaggacgaggcgacgacctgcgtcttggagcgcatcgtcgacgccgtatactgcaggcgtccgtgctccaccgagatggcgttgccaccgaccgacagcgctgccagacccgtgtcaacgccgccaatgcggtcgatcacgaaacggtaggtgttggcggtgatgccgtcggtcgcggtgaccgtggcttcgatgacgttgcggccacgcgccagcttcacgtcggcgcccgtggcgtcgatggccttgccgttcaacgtcgccttgacgctggcatcggcatccgtcgccttgaacgccgcgcgtgcggtgagggccgagtccgcgccgaagtagtacagcgtgcccggcttgaagtcgaacgacttggacaggccgtcgatggtggcggacgacagcgtggccaccgaggacgggtgcccgtccagcgggtcggcggacgtgccgggggtcggcgccgtggcggtcgaggcgctcacccgtacgttgacgacggagccgggcatgcgccgggcgccggcgatgacgtaggtgcggaccgttgtctcgccttcgccgaccgcggtgatcgtgccgtcctggtcgaccgaggcgaccgccgcgtcgtcggacacgtacgcgatgctgccggtgacggggacgagaccgtccgcgccgaccttggccgaatcgtcgctgacgttcacctcggaggcacccatattggccaggtcgataccggccttgacgccgacgtcgtacgtgttgccgccgaacacgacctgcttgcatccgttgagacggaacaggcgcgatcccgacacctggctcaccgacgcggtcgcatcgattcggcgggtgtctccgacggcgagcgccacgtccgcgtcgccgcccagcgtgaccgtatcgtcggggttctcacggtagatcttgttgtcgcggaaggtcaggtcgctgacgctcttcgcgttgagcacccggttgccgttgacgtagaaggtgttgccttcgatcgtcatgttcttgtgcacggtgtcggtggtggacacggtcgggttcgtcggctccaccaggatcgcgtcggatccgctgcggcggaacgtgttgccgcggatcgtcacgtcgcgggtcgggccggattcgtaccagctctgcgcatcgttggagatgtagataccggccatgcccatgccgtcgaacaggttgttctcgatggtcaccttcttgcgggtggtgaccaggatgccgcgggtcggcgtctccttgaagacattgtcgtggatgttgacctcgggcgtgtacgtgatgttctccaccacgtggctgttgaccgcgacggcggaggggatggcgctgtcgagcgtgaggacgatgtcggtcaggctgcccgaccccgcgcccatgtcaccgccctggccgtcgggcccgtcgacggcggtgacggtgcgcacggagtcggagaccgggagcatgtcgcccttggtcatgaactcgacctggtcgccgacgaagaacgacgggaatccggcggtctcgttgtgcatgtagcgcaccttgatcttggtgtcggagatcttctccaccacctgcaggaaggtgccatgcacgttgatcgggtcgtcatgcgggttggagaagctggagttcacgacggtgatgacgcccttgcagcccgacatctgcacgaagtcggcgtatcctgcggtgctgcggccggtgccttcgccggcgccgaagttcagcccgtccatcgtgatggtgtcggtcgactggccgaccacgccgaagccgtgcaggaagcggaagtcgatgcccttgagcgtgacgtccttgtccttccacaggaacacgcccgggtggtctcgcgtggtctgtcgcatctgatagctgatgcccgtggcgttggcgagcttgtcgctcatcgacgagtacgagaagaccagccggtggttgccggcgtcggtgatgccggtgacgttctggaatatggggttggtccatacgtcgccgcgcacggtcaggccggtcttcgtgtcatagagctgcacgtacggcagggcgttgcttgccgtccagtacgtggcgccggtgtacgggctggaatcggaataccattcgatgttcgagcccgacagcctgtagttgtattcctcgggcacgtacacggtcgcggtcttggcgcccgcatccaccttttcgacggtcaggtcgatgaccgtcggcacctggaagtccacgctgaagttcttgaacgtcacgttctggctgttgatggccgcgaacgtcgtcatcttgccgtggaacacgaaatccgaaccctggccgtcgacggtgatgttcttcgtgtcctcaagcaggatgccgatcttcttgtccttgtaggacgagttcgtgccgacggtgttcgatacgtacagggtgcgccgctcggccttgtcgggatagatgtcgtagcgccccttggggaacgcgatggtgacgtccttgccttcggcggcgagttccttggccttgtcgaccgccttgatgattgcgggggcgctgtcttcgccgctatcggcggcggccccgtaatcggcgaccgagacgacgtctcctccggccgcctgcgcggtgttcgtggagaacaacggcgccaggcatatgagagccgccactaaggccgccgtcacccccccccggccgctctcctatacgctctcctatgatatccagcacgactcatggtgcttccttccctcaggggttgtcgattatgacaggcgcggcaaggaaggcgacctctatgccgtcctcacaccgcagacggaaccgcacaggtatcatccatgatttttacggctcctgattatgtaaactatattggcattacattaagacacggcgtcgaaacatcgaaatacggtatccccccggtggcacaatgagaccatgactgaaaccagcgcttttgcaagttccctcccctcccatcgcccgctgggcacgccgctgggggcacatcccacccgcgtgctgttcctcggctcgggtgagctcggcaaggaggtcaccatcgagctgatgcgtctcggcgcatgggtgtgcgcggccgactcgtacgccggtgcgcccgcccagcaggtggcgaacgaggcacgcgtgctggatatggccgacgcggcccggctgcgcgcgctgttcgacgaggtgcgccccgacatcatcgtgccggaggtcgaggcgatcgcgaccggcgagctgtcggatgccgcggcgcgcggcgtccaggtggtgccgagcgccgaaatcgccgccatctgcatggaccgcgagcggctgcgcgtgctcgcgcacgaggatctggggctgccgaccacgccgtaccgtttcgccgggtcgttggaggagctgcgcgccggggcgcgggaggtcgggtacccgtgcgtggtcaagccggtgatgagctcgtccgggcatgggcagtcggtcgtgcgcggggcggacgcgatcgacgccgcatgggtcgaggcgcaggagggtcggcgcgccgccgacgagggcgacgtgtcgcgcgtgatcgtcgaggcgttggcgccgctggattatgagctgacggtgctgacggtgagctcgtcggccggcgtggtcacgtgcgcgcctatcgggcagaggcaggaaagcggtgactaccgggaatcctggcagcccgcggcggccgatggcgaggtgctggaaagggcgcgtgccatcgcctgtaccgcggtgcaggggctggtcgacaaggccacggcatcgggcgaaaccggatggggcgtgttcggcgtggagctgttcgtactgaccgatggatcgatcctgttcaacgaggtctccccccgcccgcatgacacgggcatggtgacgctgatctcccagaggctgagcgagttcgcgctgcacgcgcgggcgatcctcggcctgcccgtcaccgaagggcatgtggcgctggcgatgggcgacgggcagaccgccgcgagccacgccatcgtggtcgccggcgacggcgaggcggaattcaccggagtggagaatgcgctggccgaacccggcaccgacctgcggatcttcgccaagccgcgagtgcatggacaccgccgcatggccgtgtcgctggccatcgggacggacgccggtgacgcgcggcgcaaggccgccgatgtcgccgatgcgctgaccatcaccgtgcgctagcgccacacgaagaccgcggcacatctttcatctctatccggcgaaagtcccatccggttcaactccaatgggactttcgccggataacacgcagctgaacacacagccaaacgcgcgaccaagtacacagccataggcctccttcatcccgccagagtcccgtttcggacggtacaggtgggatcatgcgcggatagcagccgcagcgagcgtgttagcgctgcgcatgtagccgcccattggtattcttttaccgttagttcacccagaaattccgctcctcaagcatgatttggaaggcgattatggagaaattggaaaagctctacgagggcaaagccaagcagctgtacgcgaccgacgacccggaggtcctgtgggtcgaatacaagaacaccgccacggccggcgacggcgagaagaaggaggacttcaccggcaaaggccgactgaacaacctcatcaccacgatcatcttcgacctgctcaagaagcgcggcatcgacagccacctgatcaagcgcgtgaacgcgaccggccagctggtgcgcaaggtgaacatgttcccgctggagatcgtgctgcgcaacgtcgcggccggccacttctgctcccgtctaggcgtggaggaaggtctgcccctcaaggagccggtgctcgaatacttcattaagaacgatgacctgcatgatccgttcgtcaacgacgacgatctggtcgccctgggcgtgtgcacccgccaggacctcgccgagatcgcgccgctcgcccgcaagatcaacgaggccctgatcgagatcttcgccaagatcgacgtcaagctggtggacttcaagatcgagatgggccgcgcgtccgacggcacgctgctgctcgctgacgaaatcaccccggattcctgccgcctgtgggatcagaaggatcactccggcaaggtcgagcaccttgacaaggacctgttccgccgcggcctgggcagcatcatccccgcctacgaggagatcgaggagcggcttgccgagctcgccaagtccgagggcatcgaggtcaccgagtaattcatccaagcgcaagtagcagaacataatgttggctcccctctggaggggagctgtcgccgatagacgactgaggggaggttaaggcgttcactgccatgacatctcccctcattcagcttcgctgacagctcccctccagaggggagccaagttctttcaccacgcctcttcattttttgaataacttcttaagaaaggattcccatggtttttcgcgtgtacgtggagaagaagcccggcttcgacgtggaagcccagcagctcggcaccgaactgaagaccatcctcggcatcgatggcctgcgcaaggtgcgcatcgtcaaccgctatgacgtcgagggcatctcccaggagctcttcgaacaggccacgcctaccgtgttcagcgagccgcaggtggatgacgcctccgcgaacctgcctgacttcggcgacgcgacggtgttcgccaccgagttcctgcccggacagttcgaccagcgcgccgactccgccgcagagtgcatccagctgatctcgcagggtgagcgtccgaccgtgcgctccgccaaggtgtacgcgctcgaaggcacgctcagcgaggccgacgtcgatgccatcaagcattacgtgatcaaccctgtcgaggcccgcgaggcgtcgctggaagccaagaccacgctgaagacccaggtgcccacccccggcaaggtcgagaccatcgccggcttcaacgagatggacgccgctgccggccagaagttcatcgacgagcgcgggctcgccatggatctggccgatcttgagttctgccagaagtacttctccgaagagggacgcgagcccacgatcaccgagatcaaggtgatcgatacctactggtccgaccactgccgccacaccacgttcggcaccgaactggacaaggtcgacatcgacgacgccgcggtcaaggccgctttcgaacgctatctggagatgcgtcacgagctcggccgcgacgccaagcccgtgtgcctgatggatatgggcacgatcggcgcgaagtggctcaagaagaacggcatcctcaccggtctcgacgagtccgaggagatcaacgcctgcaccgtcaaggtgaaggtcgacgtcaacggcgaggacgaggactggctgttcctgttcaagaacgagacgcacaaccaccccacagaaatcgagccgttcggtggcgcggccacctgcatcggcggatgcatccgcgaccccctgtcgggccgttcctacgtgtatcaggcgatgcgcgtcaccggtgccgccgatccgaccgtgccggtctccgaaacgcttgaaggcaagctgccccagcgcaagctcgtgaccaccgcggcctccggctacagctcgtacggcaaccagatcgggctcgccaccggccaggtcgacgagatctaccaccccggctatgtggccaagcgcatggaggtgggcgcggtcgtggccgccaccccggccgaccatgtgcgccgtgagaccccggcccccggcgacaggatcatcctgctcggcggtcgcaccggccgtgacggcatcggcggcgccaccggctcgtcgaaggctcacaacgtggagtcgctggaactcgacggcgccgaagtgcagaagggcaacgcgcccgtcgagcgcaagctgcagcgcctgttccgccgcggcgacgcctgccgactcatcaagcgctgcaacgacttcggtgccggcggcgtgtccgtggcggtcggcgagctggccgacggtctgtacgtggacctcaacaccgttccgaagaagtacgagggacttgacggcaccgagctggcgatttccgaatcgcaggagcgcatggccgtggacgtggcagccgaggatgtcgacgagttcctggggtacgcccgcgaggagaacctcgaagccacggtgatcgccaccgtgaccgaggacccgcgcatggtgatgacctggaacggcgacaagatcgtgaacctgagccgcgagttcctggcgtccaacggcgcctccaagcatcaggtcgtgcgcgtcgaggagcaggaggcgtacgaggtgcccgcctcgtggcgcgaaggctcgctggccgaccgcatgaacgcggtcgtcaccgacctcaacgtggcatcgaacaagggtctgtccgaacgtttcgattcgacgatcggagtcggaaccgtgctcatgccgttcggtggacgcaagcagctcaccccgaacgaggccatggtcgccaagctccctgtgttcggcgagaccacgaccgcttcggccatggcgtggggcttcaacccgtacatcatgtcgaagaaccagttcaccggcgcatacctgtcggtcgtcgagtcgctgtcgaagctggtcgcggccggtttcgaacacgagaaggcgtacctgagcttccaggagtacttcgagaagctgcgcgacgagccggaacgctggggcaagccaacggccgccgtgcttggtgcgctgatggcgcaggtcgacctcggcgccggcgcgatcggcggcaaggattccatgtccggttcgttcgagaacctcgacgtgcctccgacgctgatctccttcgccgtggccgtaggcagcatgaagcgcgccacctcccccgagttcaagggtgccggccaccgcatcgtgcgtatcgcgccgcgttacctggccgacggcctgaccccggacaagaatgcgctgcttgaggcgttctcgctggtcgaggagcttaccgacccgtcgcatcacatcgcgttggccgtctccacgccgggctacggcgcgactgccgaggcgctgttcaagatgacgcttggtaaccgcatcggcctgacgctcaacgagagcatcgccgcggacgacctgttcaagcctgcatacggctcgttcatcatcgagctggcggacaacgagaaaatcccggtggcctccaacctggtcgaggtcggcgagatcggcaccaccaccgccgagtacgtgttcaaggcggcgggcgagacgctggatctggcgaacgtgcaggaggcgtgggagtccggcatcgaatccgtgttcccataccgttccaagagcgacgaagccggcaagagcgtcgaaaccatcacattcaacgcgccgaagaagaccgtgtacacgggcgccggcgtcgccaagccgcacgtcgtgattccggtgttccccggcaacaactgcgagtatgattccgccgccgccttcgagcgtgcgggcgcggacgtgaccacgctgatcgtcaacaacctgacgccggccgccgtcgccgaatcgacgcaggcgctggtggacgagatcaacaagagccagatcgtgatgatccccggcggattctcgggcggcgacgagccggacggctccgcgaagttcatcaccgcgttcttccgcgcgcccgcggtcaccgaggccgtgcgcgacctgctcaagaaccgcgatggcctgatgctcggcatctgcaacggcttccaggcgctcatcaagctgggtctggttccgtatggcgacatcgtgccgatgaccgccgaatgcccgacgctgacgttcaacacgatcggccgtcaccagagccgtctggtgcgcactcgtgtcgcgtcgaacctgtcgccgtggctgtcgcgcacggccgtgggcgacgtgcacaccgtggccatctcgcatggtgaaggccgcttcgtcgccgccgaaccggtgcttgacctgctcaaggccaacggacagatcgccacgcagtacgtggacgaggccggcgtgcccggcatggacctggccgtgaacccgaacggctcgctgctcgccatcgagggcatcaccagcccggacggccgcgtcttcggcaagatgggtcactcggagcgctccggcaacggcctgtacgtcaatgtgcccggcgacaagtaccagccgatcttcgaggccggcgtcgggtacttcgccgcgtgacggtgatgactgactgataacagactggggcgggaaccttctcgggttcccgccccagtctgttgttgatgaagtatggcctccgcgcgatacgcggcggtatgaattactcggcctttgagggcgcgacaggttctgcgaccgccgcaccgttcgccacaggagcgctgttaacagtgttgttggccagttgctgatgcacggtcttcgcgatgtgacggctgaccatgaaccaaatcgccccggcgacaaccacgacaaacgaaatcggatagatatactcagcgattccgtatccatactgcgaggaaggcagtacgccacgatcgtcaaaatcccaacgcagtgcatagaaagcgactacagcaagcaccgagaatacgatggccgcgatcggcttcttcaacactccgaacagcagaataagcagcgaagacaccgcgatgaccgccatgagcgtaatgcatatgacagcttccaggtacatgccgccgagcagcttcccggactggagacccgcgatgtagatgcgcaggaatgtcagcagcgacagccccaccacatccttgttgtgtagaccggcttccgcggtgtatacccgatcaccatactgcttcaggtattctgcataatcgccctttgctgaggcgaacggcaggaagaacgacaccgccatcgccactgcgccgaccaccaacagcacatacggaatgagctgcttggcggggagcctcttcgagacctgttggccttgtgctatatctcccatattgtcacctttctttcctgtgttctcgtatcatgtttgatgacgggttgtgaccgtgcacgtgatactgtgcacgaagtgcttagtcatcgggtatcaatcacttgggattggtcgtcgtcacggtcaccgtgtacattccggcttcagcagtaggctcatacaagcgctcgatgacatctttagcctgtttattggcaattttcagcagttgtgttcggtctagccgagcttcggtctttttcttggcgtcttccatcgcagctttagtgtcctctacatccgctgcgttaaagaaggaatcagacttgtcaaagaaacgcagtgaatcgggattgacggccaccgactggattttcggtgcaggtagcctgatagacactgttttggagtccttgtcgatttttatctgggccttggccagatcgacccccgcgcgcacctcgtatgtgtagaacatcgtgaactgcttcttgttcaggaacgcaataccaccgtcttcgtatttctcgaagccgtaatccgtttccttagccgtggtaagatcctggatcttctccagctgcttaacgacgacttcattggtcaattccggttgaggattgaagaacttggtgatggcaccacgaatccatcctccggcgaacataaagatgacggcgacgacgaccgccagaatgattgttgctttcagactcatcttgaatgatgagccatctttgtcgacgcgtgcgcccatttttcaccttttctctttcatactctcgtcatctcaattcatgtggcatctgatgcaatccagttctggcatacgtctacaaaatgtatgggcaaaaccgcgacgagacatcagtcgtcgactgaattcgagctggttctcaccggttatgcaacacattagcgatgcacaatcagcaacacaataattataacgtaaatattgcgacataatgctatatctgagcttggttatgatccttgtgccggcaacgttgccgaaccatcatgcaccgttcggcatcaacacgagccacataagaagggaacgacaatgacatcaccgagaagttcgatttcccagtatctcccgcgaaattgcacgaagccgtccgatccacgttgtcatgcagcgccgcattctcaccacgcgaagcaaatgacaccgaaatgaaaacgacattcactccttacgacagcgacgatgtcctgacagcaaccgtgaacggcagcggtgacgagtcgaagataacgccgtctgcacaagactcgtcgaatacaggggcgcgcatcatgcgctttgccaccgatttggctgcccggcggagaggggcgaaggccggagccgtgattggcggggaacgtacaatgtgggatatgagcgagcatgtggagcatgggttcggcccggtgtgggacagcgaatcgcggattctgatactggggtcgatgcccagtccgaaatcgcggaaggcggcgttctactatatgcacccgcagaatcgcttctggccggtgatgcaggcgttgttcgccgacccggcggatccgtctgatgtcaccggcgactcgctgcaatcccgccgcgcattcgcgctgcgccaccatatcgccttgtgggatgtcatcgcgtcctgcgacatcaccggggccagcgacgccagcatccgcaacgccacgccgaacgatctgacgcccctgctgcgcgatgcgccgatcgctcgcatattcaccaccggagcgaagtcggcgcaactctatcgcagactcatcgaaccacgactggccgcaaccggcatcaccatcggcatgactccgctcccctccaccagtccggccaacgcctcgatgcggctgccggcgcttatcgaagcctaccgactggccttccagagcgcaggcgctctggaaattgcggatgaaacggtcactggtctctgacgcgatcgcggcgtggacggcggcgacgggcaatcgacgcgcccaaccggcagaccgggatgagatacaggaatggcgccgcgaatcgtcagcctcagccgaatgatatgcgccggagcacaactgatgggtgcaacgatcaattgcggcattggctggcggacggcaatctcgatgtgacggtggcggatttcaccggcatgccgaccggcgtggagctggtggatttctatcaggaacgtatggtgttggtcatcgcgaactcgctgtgactggatctcgccggcggcgggaccgccatcggcgccggtgacctgtcatccttggagcgctgcccgttcctgctgggcaatccgcaggacatcgacggacgcatcggcgacatgctgttccgccgagccggattcgctcccgtggctgcgggccgggaacctcatacgcgatcagcttcggcatatccgcctgcgactaccggtggagcgcggtcgatgatttcatcgaccgcgcgcgccggagcatcagcaccattgaccggcatgattccggccggaaccgtcggatcacgcctgatagtcgttgagcatggcctcgatgttgttgccatcgggatcatggacgaacgcggcatagtagcccggcccgtagttcgggcgcggaccgggcttgccgttgtcggtgccgccggccgcgagacccgcctcatggaacgccttgatggcgtcggcggtcttggcgcggaacgcgacgtgtgacggcacgaccggattgccgtccttcggcgattccagccagatgccatcgccgtcctcgtcgttggcgaagcataccgcagtcgggtatgcggccttcttgacatagcccagcggcgccagcagcttctcgtagaaatcggcgcgcttggcggcgtcggcgacgaacagtccgatgtgatcgatcatgatgaacctcctatgaccatgtggatgactattccattatccttgcatcgctcgtgacgcgggtgaatatcagctttgggtaaagccccgtttcaggcgccgaaatcggtgtcgccggcggcgtcggcccgggccacggcagcctcggcatcgcatgcggcctgttcgatgacccgctcgtagccggtcaacgcggcgaacggcatgaactgggcggcccgctgacgacgggacatctgcggatgcctgcgcgacacgtgatgcggcatatcgataatgtcgtcatatttatgcgtctcatgtaatgccatatggactccttttcacgcccgatagcgcaatacgctcgatacgctcatgcacgatggcctccgatctgccgattgcggtcctggccggtggcgccgtcctccatgtccatcgccttgatgacggcattgcggccgaatttcctcttgacctccagcaatgcagtctgcatgtcatgctcacgccgcacatcactgttcgaaatgccgacatggccatcgtccccctcctccgcggacgaatcgatccgggaaaacaaatcaagctgctcgtagcgtttgccggccgcaagctcattcgccgtggccacatcatcggcgatgacggtgagccggcgcaccaacagacgcggatccacgatgcgctcgtacagcatcgtcatcgcctcacggatgcgagtggaagacgaggtgaactcccccagtccgatcgacccggtggccggcttggggacccgccgcccataccggtcgacggacaccggcccgcgatagctcttgcccgcctgatcggaggcccgtttcatcgccgaatccgcgcaggaatccagtttggtcgagtcaaggctgccgatgtcgtagccgaccgcgagcgtcagacgattcgtcagcacccgcttgccgacaagatccaaggcgagcgcgtccgccatctccttgacgatgagccgtcccgtggcatagtcggcgggcccggtgagcacctgcccactgctgatgctgtgcgcatccggctcatacgattggatgtccgcgatcgtgcacggctcccagccccacgcatggtcgatgagcagttcggcgttcctgccgaacatgcggtagagcagatcctcgttgtagtagtcggaggcccggccgatcgagcatcgggcgacatcccccatggtcagcaggccggcatgctcaagcttccgggcatagccgcgaccgacccgccagaaatccgtaagcggacgatggttccatagcagtcgccgatacgacatctcgtcaagctccgccacacgaacgccatcctcatcggcgggcatgtgcttggccacgatgtccatcgccaccttcgccagatacatgttggtgccgatgccagccgtggcggtgatgcccgtctgcgcgagaatgtcacgcacgatggccctcgccatctcgtgcgggcccatgcccagcgcgcgcagatagggcgtggcatcgatgaacacctcatcgatcgaatagacatggatgtgctcgggcgcggcatatcgcaggtacacgccgtacaccctgccgctcacctccagataatgcgccattcgcggcttggcgatcaccatcgacgccttcaatctcggggaatgttcaagatcctgagaatcacaggattcaccggacagccgtccgccgggagccagcatcgcccgctcggcgttcaccgatgccaagcgccgccgaacctcgaacaaacgtgcgcgcccgggaatgccatacgccttcagcgaaggagacacggccaggcagatggtcttgtccgtacgctcctcatccgccaccaccagatgcgtgcgcagcgggtcgagaccacggtcgtggcactccacggaagcgtaaaaagacttcaggtctatggcaagatacacatgctcgccccggaccatcgtcaccaccccctttcgcgctttcgtttcagagtacaatcattatgagacatatgttcgatagtatgtcgccgcccatgaggcccatctgccacacccccgagcgcggatgtagccgccgattggtactgtggataggtagcgaatcccctgtcccccatgttttggaaggagctttggcttgtcagctgaactcgaagacattcacgaagaatgcggcatcttcggcgtatggggccacccggacgccgcccgcctgacgtatttcggactccacgcactgcaacaccgcggtcaggaaggcgccggcatcgtctccaacgaccacggccatctcatcgggcaccgcggcctcggactgctgacccaggtgttcggcgacgagcgcgagatcggacggctcaccggcgacaaggcgatcggccacgtgcgttatgccaccgccggatcgggcaccaccgacaacatccagccgttcatcttccggttccacgacggcgacgtggcgctggggcacaacggaaacctcaccaactgcgtgtcgttgcgtcgcaagctggaggacgaaggcgcgatcttccactccaactccgacaccgaagtgctcatgcacctgatccgccgctcctccaagccgaccttcatggacaagctcaaggaggcgctcaacaccgtgcacggagggttcgcctacctcatcatgaccgaggacgcgatgatcggcgcgctcgacccgaacggcttccgaccgctgtccctcggcaagatgaagaacggcgcctacgtgctcgcctccgagacctgcgctctcgacgtcgtcggcgccgaactggtacgcaacatccgccccggagagatcatcgtggtcaacgaccacggctacaagatcgtgcagtacaccaacaagacgcagctggccatctgctccatggaatacatctacttcgcccgcccggactccaacatctacggcgtgaacgtgcactccgcccgcaagcgcatgggcgcgcgcctggccgaggaatccccggtcgacgccgacatggtcatcggcgtgcccaactcgtcgctgtccgccgcgtccggttacgccgaggccgcgcacctgcccaacgaaatgggcctgatcaagaaccagtacgtggcccgcaccttcatccagcccacgcaggagctgcgcgagcagggcgtgcgcatgaaactgtccgccgtccgcggtgtcgtgcgcggcaagcgcgtcatcgtcatcgacgattcgatcgtgcgcggaaccacgtccaagcgcatcgtccagctgctcaaggaagccggcgccgccgaagtgcacatgcgcatcagctcgccgccgctcaaatacccgtgcttctacggcatcgacatctccaccaccaaggagctgatcgccgcgaagaaatccgtcgaggagatccgcgacttcatcggcgccgactccctcgccttcctgtcgctcgacggcttggtcgaatccatcggcctcaacgcgcaggcaccctacggcggactgtgcgtcgcctacttcaacggcgactacccgaccgcgctcgacgactacgagaccgacttcctcaagtccctcacccccgaggaccgtgtccgtctgcccgaattcgcgctctacaagagcaagtacgaaggcaacgagtacaccaccgcgccgacgcagcaataacggcgttccagcaccacagaccaatcccaatcccgacacaacccaacaagcatcatccaagaaaggtacgtcatgccacaagcatatgaaaacgccggtgtcagcgtggaagccggctacgaggtcgtcaagcgcatcaaatcgcacgtcgcccgcaccaaccgtcccggcgtcgtcggcggcatcggcggcttcggcggcctgttcgacctcgcgtccctcggctacaaggagcccgtgctgatctccggcaccgacggcgtcggcaccaagctcgtcgtcgccaagatggtcgacaagcacgacaccatcggcgtcgactgcgtggccatgtgcgtcaacgacatcgccgcccaaggcgccgagccgctgttcttcctcgactacatcgcctgcggcaagaacgatccggcgctgctcgaacaggtcgtctccggcgtggccgacggatgcgtgcagtccgatgccggtctgatcggcggcgagaccgccgaaatgcccggcatgtatgacgaagacgaatacgatctggccggattcgcggtcggcgtggccgaaaagtccgccatcgtcgacggctccggcatcaccgccggcgacgtgctcatcggactgccatccaccggcgtgcactccaacggcttctccctcgtgcgcaaggccctgttcgagcaggccggctataccgtcgacaccatgctccccgaactcggcggagccaagctcggcgacgtgctgctcaccccgaccaagatctacgtcaagacactcaagcccctattcaaggcaggcgtcgtcaagggcgtcgcccacatcaccggcggcggtttcatcgagaacatcccccgtatgatccccgacggcctcgccgccgacatcacgctcggatcctggcccgtccttcccatcttcgacgtcctggaacgcgccggcgacatcgaccacaaggagatgtacaacatcttcaacatgggcatcggcatggtgctcgccgtctccgccgaacgcgccgacgagacgctcgccctgctcaaggacaacggcgaagccggatatgcgatcggcacgattgtccccgacaccgacggcacgcagatcacgctgaagtaagcatccactcccgcactccccactgatggggagtgcggtcacaagcgaatccgggggtggccggcaagccccccccagtccgtctgcaacggacagccccgccagcggggcctgaagaaaggacacatcatgggtcagaaagtcttggtcatcggctcgggcgcacgcgaacacgccatcgcgcacgcgctgctgcgcggcgacagcgtcagcgaagtcaccgtcgcctccggcaaccccggcatggaactggacggcatccgcaccacccaaatcaacgaatcaaaccacgccgccttcatcagcttcatgcagcacaaccagtacgactgggcgttcgtcggccctgaagtccccctgatcgaaggactcgtcgacgacttcgccgcggccggcatcaaggccttcggccccaacaaggccgccgcccagatcgaaggctccaaagacttcgccaagcagctgatggcccgccacaacatccccaccgcccaataccgcaccttcgacaacctcgaagactccgtcgcctacgtgcgcgaacacggcgcccccatcgtcgtcaaggccgacggactcgccgccggcaagggtgtcaccgtcgccatggacgtcgacaccgccatcaccgctctcgacgacatcttcatcgaccaccgcttcggcaaggccggcgccaaggtcgtcatcgaagacttcctcgaaggccaggaattctccctcatgagcttcgtccgcggcaccgaattctggcccatgcccatctcccaggaccacaagcgcgcctacgacaacgacgaaggccccaacaccggcggcatgggcgcctacagccccgttccccagatcggccaggacgtcatcgacaccgccatcgacaccatcgtgcgccccaccgtcgaagccatggccgccgaaggcacccccttcaccggcatcctctacgccggcctcatcgccaccgccgacggccccaaggtcatcgaattcaacgcccgcttcggcgaccccgaaaccgaagtcgtcctccccaagctcaccagcgatctcggagcagccatcagcgccatcctcgacggcggcacccccgccttcacctgggacagcgacaacgccaccctcggcgtcgtcctcgcctccaacggctaccccgtcaacgtcatcaagggtgccaaaatcccctccatccccgtcgacgacgcctcccacgtctactacgccggcgtctccaacagcgaccaaggcctcgtcgcctcctccggacgcgtcctcctcatcgaaaccaccgcccccgacctcaagtccgcccaagacaaggtctacgcaatcatcgacaagctggacacggagggaatgttttaccgccacgacatcggtgccaaagcgctgaagtgagttgtgcggcgcatctgctgcgttgcggagcgctcgaagtaccatcgtacgtccgtcgcattccgcgccttgcatctgcaccacacaactcacttcaggcggtaaaaagccgtgtatggcatgcctatgaaattgcccccgctagtagcgggggcaattgctattttgtgaggccttacggcagatccatgaagtcggtgtctttcagatagtttttgccggccgtgatgtcgtactggatgagcttgtaatcggtcatcagctgcttggtctgctcgtcgaactcgtcctcggccatcgggttgcccgccgcgtcaagatagatatcctgcccctcggggatgcggtcccatccctggatcttgttgaccaccggcggctccatggcggagaccttcttgtgcatgagcgtcaggaacgccaggtacggcgacaccttcgcgttcatgtgctccgcagtctgcgccacgaaatagttcggcgacgagtacacgctgttgtcgaccttcttgccctgcgagccggacgccttgttggaccatatgaaataatccgtcaaatgcagcgccagcgaattgttcgtatcctggctggcggtttcgtagatgcccggcagatggtcgccatagaacacgaccgtcaccggcttgtcgagcttgttgagctcatcgaggaagttcttcgtctccgtatcggtgatgctcgcgcccttcgcatacgtgtcgatggccgtcacttcgtcggagccgagggaatcggcgccgtcggccgcggtggccttgaactcgttgtcggcataccagtcgttgtacggcatatggttctgcatcgtgatgatctggatgaactggttcgaatcggtcgagctgatgtcctccaacgcgctctgatacgtggccttgtcggacacgtacggggaacggtcgatcttgtcccgatgcttgatgatgtcgtcgccctgcagcgtgtagaaatgcgcgaatccgaacttcttgtagttcgtcgcgcgcgaatacatcgacggctcatacgggtggaaggcgatggagttcttcggagccccccacatctggttgatcgtcggcgtccaatgctgccccggtaccagctgctggtacgggctggtcagagacgagtcgaaattcgccatgctcaggcccgacaatcccatatactccaggttcgcggtgccgccaccgtatccggacgacagcatcagaccgctggtcgtgccggatttgatggcacggacctccggaatggcgtccttgttgagcttcacaccgggtacgcgcgcggggtctgagaacgattcggacagcacgtagaccaccgtcgaatcggtcatgttcttcgtgcgcgaggcgttgatcttctcggcggcggcctcgtacctcttgacgacctccttcatcgtggcctcgctgtaatcgctcggctcatccatgatcgtcgggttgagctgccgggtgaacgagaccagcggaccgttgcgctgcgcgtcatacacggaatcccacatcgaaggagtgtcgcccagggccttggaaaaaccgttcgcccacgagccgacggtgctgacctggtcacagtacaggccgaagaacaacgacggcagcaggaacaccatcagacggattccggcggccaaccccttgttgtcgaaacggatcatgcgaccatgccggccatcgacatggttgagcaccacgaacagtgcgacgaacaccaggaacaccgcgagtgcgccgaggatgatccaatgggcccccggaggggtgaaactcatcagattgccggtattcgagccgaggaagcccaggtcggacggcagaatcgcctcatagcgtatggacaccttgaaatgctcgatgacgcccacgatgatggccacggccagcagcaccggcgtggctatccagaaccggttgaacagcatgagcagcgccagatacagcgcgccgatgagcagcaggttcagcacgaacacgaagttgcccttggtccacatcttcgacacgaaaccccagcccacgacgggactggacagctgcacgcgcgtgccggactggctgacgccccactgcagcgcagcgaccgccgccatgtcgaacaccacgaacaggacaccgtacagccagccggggaacggcttatactcacggcgaccgccgtttctgccgcctttgccgccgttcctgccggaagaggagtcggcccgcttgatatccagcacctcgatctcgccggacgggctgacggcatcggccacgttcgtaccgtcgtcgttcttgtcgtttatttcgtcgctcatatacccgcacttcgtgtgattcgcatggcgccatccgacccatgcccaattcgttatcggccatatacacgtcatcatggttcttccgccacgtcacgcgcggaagggaacggccatgcgccgccatgatgaataccgaatgacattctagtaaagaaacgacgacaatggtacatcacgttcactgatatttccctgaatctccccgtatgagaccagtctgagacccgtatgggccactcgccgcccgttggaatccgcgcggaagagccccgcatgatccgcataagtgggccccgcatacagcatcgggcaatatcatccctgagacggacgaaaggcgccgggtcataccgggtaacatcgaccgatgacacttacaagggggatgatcgcatggaatcgttgccgagttgggtgacgaggttactgcatatacgactcgtctcaggcccgttgccaaccacgatatgggtgattgtcggcgtgggagtggcgatattgctgctgtggcaggtcttcaggagcgatcggtccaagctggcgaggcaggtgcccatcatgcttgtctgcggtggcttcggcctgctggtcatgtggctgctttccgaaaaattcatggtattcggcgtatcgctgggctggcccgtcatcatggctgcggccgcgtgctgcgcgctgttgggactgctggtgacgaccatcgtgcacgcccggcgcgcacggcgcctgatggccgcggtgctcatcccattcgtgctggtctccaccgcgctccgtatcgactcgatttacggggagtatcagaccatcggctcgctgatcggctattcgtcatatcatccgctcagcacgtcgcacatgcagaaggggaccctgaccgtcgatgaatggctgcgagaggtgctcgatggcaaactgccgcccgccgccgcgcacggcaaggtctattcggtggacatatccaacacagcctccggattccgcgcgcgtaccgcggccgtctacatgccgccagccgccctgagcgacacaccgccagagctgccggtactcgtcatgctcgccgggcagccgggcaatccggaccgcgtgttctcggccagcggcatcgccgcgatcctggaccagtatgcgaaggcgcatcacggtctggcgcccatcgtcatctcgcccgaccagaacggcgacaacacggtgaacagcctgtgcgccgacacgaccaaggtcggacgcgcggagacgtatctgaccgtcgacgtgccacggtggatcaaagcgcatctgcccgtgtcccggcaggcgcgggattgggcgatcggcgggttctcgcagggtggcacgtgtgccacccagttgggaccgcggcacccggacatattcggctccatcatcgccgtggacggcgagctgaagcccaccgccggatccgtggagcatatggtcgccgaatatttcaacggcgaccgcagcgcctatgaggctcaagtgccggccaacgccatcgccgaccacgcgccttccaaccagatcatgattctgggggcgggcaagcgcgacgcgagatccataaaaaacgtcatcgtcaacggccaggccggtgtcaaggccggcatgcacgtcgtgaagatcgtcgtgcctgacaccggccatgactggcattccgtcaacgcgacattggaggcggcagtcccctggctgtgcgcgcaccgctggggtctgggcgaaacgggcctgacatggtccgactatccgagaatcgaggttctgcaatgagcgacacgaaagtcgaaccggagagcggcaaagaaagccgccgcaaatgccgtacccacggcaggatgcatgccttggtgcaggacgtgagcgtctggattcacgggcatcgcctcgcagtggcgttgtcctgcacgttcgcggggctcaacatcgccatgtggatcggcttcgcgctggccggccgtccactgcctctacgcagcctgcgcaccagcctgcaggagttcaacctgctgcatctgctggccacgctgctgctgacacgcggaatcctgcagctgctcgtcgacacgatcgcgctgttggtgatgttctccatcgccgagacgctgctggaccgccgccgcaccctgacggcggccttcatctgcacgctcgccggaacggccctgggactgctgctgtgcggaggcatcgcccaactgctgcagggcactccggtggtgggccgcatccgtttcgcgctcagcccgctgacgctgggcgtgggcgcgatgatggcggccagcgcgttcacccgccgcctgtggaggcggcgcatccgtctgatcggctatgtgtccattatcatggttgtgatgttcagcggtaatcccggtgactactgcctgctcgcggcggcgggattcggccatgtactgggcgcgctggcatccaagcggaagaccgtccgacagctggacgacgcttcggcggcggatccgctgcactggcagctgagcacgtcgtacgagacccgtcgcgtgttcgcggccatcgcgctggtactcacgctcggtccgatcatcgcgatctcctcaccaacccatatcggcccgttgagctcattgggactgattatgagcccggcctcacccgatgacggcaagctcgcctcctgccttgccggcatggcccgcaccgactgcttcttccagttcaatctgctgcgggtgtccatgcctggggcggtcctgcgttccctgctgccgaccgcggtgatgctcatcatgacctggggcctgtatcgtggcaggcgtctcgccgcatgggcgttcatcatcgtcgggctgggggaatcctgcatcgcgatgctgtactatttcgtggcgcctctgtcccacgcgccgcaggggttgcgttccctgctgctgcacggcgcgattccggcgagcatcgccaacgtgctgttgccaatggtgttcgccatcgccgtcgcctgctccatgcgccacttcccgatccgcacggacgcggggcgtctgcggcgaggcagcgcggcggtcgtcatcgccctggccgtctgcatcgcggcgtatctgggcttcggactgttgcgccccggcgatttccggcctccggcgacatggcatagcctgatgcatgagctgccgtcacggttcattcccatcgggttcctcaaccgcagcaggccgtcgttcctgccgcgtaccgtggccgcatcggtggtcgatcaggccgtgggactggtcttctggctcgtggtgctggtcgtcgcggtccgatggatgcgtgagatcctgctggtcgacggacgcgcccgcgccaacgccggccgcctggtggagctggatggcgagtcgatgagcttcatgaccacgtgggagggcaaccactactggttctccgccaccggacggtcggccatggcataccgggtgatccacggcatcgcgctgacgaccacgggcccgttcggcgaccgtggcgaatggtcgtccgacctgcgcgagttcgctcggttcagcatgcagcagtcatggtcgcccgtgctatacagcgtgcatcgcgagcagcgcgaccagcttgccgccatgggctggtattcgctggaggtcggcagcgagatggtggtcgatccccggcaatggaagacgaccggcaagaaatggcaggacatccgcaccgccatcaacaaggcgaaacgttccggcatcagcgacgtgatgtcgaccttcaacgaggccccgaacgacatacgcgaacagatcgaggagatctccgagcagtgggcgcagctcaaggcgctgccggagatgaagttcacgctgggcggcgtcgaggagctgcacgacccgcgcgtgcgcatcctgtacgcgatcgacgccgaggggacggtgctaggcgtgaccagctggctgccgacgtggcgcgacgggcgcatcatcggctggacgcttgatttcatgcggcatcgcaccgacagtccgaacggcatcatggagttcctgatcgcgcgcatggcggagcggctgcgtgacgaggggctggagcaccccgagtgcgccgtcgagttcatgagcctgtccgccgcgccgctggccggcatgaacccgcagcgcgacaatgccgacgagaccggacatatggataccggcaccgtcatgctgcagcatgcgctgcagatcgtggcggattggatggaacccgcatacggattccactcgctgttcaatttcaaacgcaagttccagccgaccgaggagccggtgtacatctgctatcccgatccggccgtgctggcccaaatcggactggcggtcgtccgcgcctacgtgccgtccctgacggcgaaggaggccatgggcatgctgcgcacactgcagcggtagccggccatccggcccttcatgggttccggacaatcgccgtgacgcgcctgtgtacacggcagggttgccacgcataaaaaacaacaatcgcaggatttcaccatcccaaccgtcctcccggcagccctgcgacgcattttggcgtgtctcccataagacgcatgttcggccgatgacgatgatcgcgcacccgccgcgtgaatccggatacggccggcgtgtccatcatcttgcccgtatatgcgtccggcgggatttcgcagttccatcgcggacgagctcaactgttacacgggtcaagcgtcactgtgcgtgggtaccgtcaccgtgcgtgccctcgcagcgtgactgcgtcacggaaatcattggaaaataaggatttctaccgcccgcgtcactgtgcgagccctcgcacagtgacggtacccgcgcacagtgacagccagatcatccatcagacgaaacggcatccacatcgtgaaaatgacgccattccagcccggccgaatcggatgattcgttccccggagcccgtcgcgaagcaatcgaagactgctccgaagagcccatcacggaatgatgcccctccatgcgcagaagcgacgaggcccccgcaaggaggccccgccgctgaaggagatatagatagagatagaatcagcgcgccggcatcacgccttggcgaactggtcgacgagggcgctcatccaatcgagcaggttggtgtattccttcggcatctgctcggtgagctcgacgatcgggacgttggcgctcttggcggcaccggtgatctgatcggtggtggagttagcttcctgcgtgttgaataccagcatcttgatggagccgcccttgagggcgtcctggaacgccttgatgtcggacggggtgggctcgctctcgttggcggaggcctgcgcgtagccggtcggggtggcgtccttcatgcccagatcgtcggcgaggtaccatgcgacggattcggtcgcggcgtacggcacatccttggtcttggcggaggcgtccttgatcttgctttccagctgatcctccttggcgtgccattccttattgagcttggcgtagtcgtccttgtggctcgggtcggccttctgataggccgcggtgatggcgtcggcggtgttgttgcgcaccttggcggagaaccagacgtgcgggttgtcgccttccttgatgccggcggtttcggctgcggtgaccagcgtggccttcgtcgcggatgcggccttggacgcccacggatcatagtcggcgccgttcacgacggcgaccttcgcggtgccgaacttcgcgacgtcctggctggtgggctcgtagtcgtgcgcttcgacgttggtcttcgtcatgatgttggtgacgtcgacgtgggagccgccgaggtccttggcgacggagccccactggttgatgctggcgacgacttcgatggtgccgccgccttctcccccggcggtcttgttgtccttgctcgttccgcatgccgcgacggccaccagcatagaggcggccgccacacccgcgacggcgcgcctgatgatagatgaaatctgcatttgttattccgttcctctccggatgatgacgggctttctcccgttctttcggttcacagtatacacgttattgagatttattatcattatcgttatcaaacgggcgtgtcgcgcggccgatcacgcaccgacggacgactcgacttcatacaggccggctatgtcgcacaggtccgcctcatgggcgtcctcgaccaccacggcgccccgcctggccacggcgcggatgatgtcgcggcacgcgcatccgccgtcggcatccacatgccgcgacaggcagccccggccgaccaccggcagctcaagaacatgcgtcgcctcccggatcaggcgcgacaccaccgcgccggtcgaccgctcgtcgaatacgccatcctcgtcacccgtgccatacacgcacagacggtcgtcgtcgaagaaccgctcctcgaactcgtccagaccgaccgcattgaccacagccgcgacgcccatgccatcaccccacgaatcaaggcgcatcatgtcttcgagataccgggcgaccggcgtcgcctccagtcccaccggaagacccaccaggaacacacgggcctgacctcgcagagaggcgagcgtcccgcccgcgtcgtgcttgaccgagcagctcagacaacaatccgacagatcgaagatttccacgtcgcccaccccgacgccccgccccaccgggcggctgacacgcctgacgatgctcagaccggcatccgcctcgtcattcgggcgcacatcgtacgagatcgcgcatacggacgcatacgagtcggccagggagaacgccacggagtccagactcagccgatcggcgcccgtcagcagcaccaccgccgtatccgcgtttccccgtgattgcaatgtcggatgactcatgatcgcctttctttttgataatgattatcattatgatatattggcatccatgtccaaacaatgtcaaattctgggcacgcgcgcctcaacgggcaaccgtgtatcccactcgcacaggaaaacacgccgacgcttcaacccgaacctgcagaccaagcggtactgggttccctcgctcggccgtcacgtcacgctgaccgtcagtgtcaaaggaatgaagaccatcgaccgcatcggcatcgaagcggccctggcacgcatccgccgcaacacgccggaccgtctgaaactgacgaagttcgacccggtcgtacgcaagcgggtcacattccgcgagacccgctgaatccgttccgacggcccgcacgaaccgcggccgtccgagcgtcatctcggcacacagccatcatcaaggagcctcaatggcaaagaccagcaaaatcaacaagcaactgcaacgcgagcagatcgtcgccaaatacgcgcagcgacgggcacagtgcaaaagggactcggtcaacccgcacctgaccgccgacgaacgcgccgaggcaatgcgccgactgcatgcgatcccccgcgacgccagcccgaccaggctgcgcaaccgcgacagcatcgacggccgaccgcgcgccttcaaccgtaaattcggactgtcccgtatcaacctgagggaaaaggcgcaccgcggggagcttcccggcgtggtgaagagcagctggtgatccagcgcggcgcaccaacatcgcatcatcagaaaggcatcatcatatgaaagacaacatccatcctcaatacgggtacgtggtattccgcgaccggtccaccggaaaggcgttcctcacgcggtccacgctggtcgcgaaggccgcgagcctgccgaccatcgaatgggaggacggcaacacctattccctggtcaacgtggaggtgtcgagctacagccacccgttctacaccggccgcaacgtcgtgctcgacacggccggccaagtgcagaaattcaacaagcgctacggacggagctgacagggccggcgaatgccggcatcccaatgcgcgaaccatccccacccgctacgcggaagcccccgctggcgggagctggctcgcgaagcgagactgagggcggtcggccgaccggcgcagcacatacctcaacactgcataaacccatcgaaaacacgaaacggagcaacgatatgaaggtcaaatcgtcgatacgctcgttggcgcgcaaggacggctcgtacgtcgtgcgccgccgcgggcatctttatgtgatcaacaagaagaacccccactggaaagcgaggcaaggctgatggcactgccgaaagtcagaacgtcgcgcgcgaacacgcatgcgcgcaggtcacaatggaaggcgcaggccgcgcagctgatcgccgtgcacatgcccgatggcgaggtggtgcacgtgccgcacagtctggtcaaggccgtgcgcaagggatacgtgaagccgcggtagacccgcgacccgatgcgtgatgggtcaatccacgcgaaccagccgccaagaccagtgacatggcctcagcagggacttgtatgcagggtgccgcttctcaagacgagaggcggcacctttttgcattgggaaccattatcaccgtggtacgatatggcggcatcatcccataccgacagcccatgccggcaattcaaggagcgtcataatgtcatggggacatcacaccggcacggttcatgacggcaccggacggggacaccacgccgatggcggcagtcccattgacgccaacggcgccgatgggcgcgaccattcggcgcattacctttttctcatcatcggcacgccgctggtggcgttcctcatcgccgcgtccgccatgttcgaatcgcgcggtctgccgattccgctggtgcgcatcggcaccggcgccgccgggctcatattgcagacgatcccgttcatgctggtgggcgcgatgatgtcggcagcggtcagcacattcgtcagcgccgatgcgttggagcggcacgtgccgaaatcactggccggcggactggcgatggcgatgatcgtcgggctgtgcctgccggtatgcgattgcatggtggtgcccacgttcgcgaatctggtgcgcaagcggctgccgctgccgtacgcgacggcgctgctgtgcgcggccccggtgatgaacccgatggcgatctggtccacgtggttcgcgttcacgggcagtccatggatggtgacggcccgcgtgggtctgggcatgctggtggcgagcgccgtgggattgtcgttcgccgtccgcccgtcccgctcccccgccgtacgggaccttccgctgacgaggggccggacgccggcctgtgatggctgcgccgtacaacatgcggggcaggatgggcgttcccgcttcgtgcacttcctcaggcacacgcacgacgatgtcatgcgcatgatgccgattctgctgtccggcacgattgcggcatccatcgtacgcaccgcgctgtccccgctgaccgacggctccggcacgatcgacggcatcggtgccgtgacgctgattgcggcggcgatggcgatagccttcctctgctcgctgtgctccacgtccgatgcggtgatcgccgcgagtatgaccggcgtgttgccggcttccgccatgctcgcttttctgcttttcgggccgatgctggatctcaagaacacgttgatgctggtcacggaatgccgtccgcagttcatcatccgctttgtcgtgaccgtcgcggcggcctgtttcctggtcgccgtcgccatccatctgacgacgggagcgtgatgcaatgacgaatactctgaactttcccggctccgaccggcatgccccggcggcacggcatgctcccgcgcttcccgaccgtatcgaggcgatctgtttcgcggcactgggcgcggccatcgtgtattcgactacgagcggctcgtatatcacgctcaccacgccccgatcgctgccgtatctgatcgtcggcgcgatactgctgttcgccctgtccgtcgccgcgtggctcggcgtgttccatgccgacgagcgatcctcgttccgtttcctggtcgcgctcgtcatccccacgctgctcatcgccgtgccgttccaacccggcaacggcaccggtttcgacacgtacgccgcaggacgggccatcgccatacgccgggacgcgcacaagccggcgggattcgctcatctccacgggctcgacgaggagcgcaagaccatcaccatcagcgatgacgaattcggttcgtggttctcccacatcgaccacaatccgcaacgatacatcggctatcgggtgcgtctcaccggtttcgtctacaagccgtccacgctcggcgcccatgagttcgagctgtcacggcaattcatgtcctgttgcatcctcgatatgacgccgttcggattcaccacgcactatgcgaagaccgcgcaccttcaggagcatgactgggtgagcgtcgacgcgacgctcgtacaaggtacgtacggcatcgccgggcatacgcggcaggggccgatgctgaagatcacgtcgctgcacaccgccaaagccgcgcccaccggctatttctactggcagtgaccgtgctttcggcggcaatccccgccaccgaaagcacggtcggcttttgctgcggctgctgcgtcaccggtgactgctacgacgactccgactgcgagcacggctccaccgaggagtgcgagggcaaggcctgcgtgcacacctgccacgagaaccgcgaaagtcacgagtgcgccttctgccacctcgccttcgacaccagcgagaagtgccacgaggaaatcctcgccgacctcaaggaactcaaggccgaactggccgcatgatataggcgaatggcggcatggagggaccgagtggcatcccttcgcgccgccattcgtcgttatcggctcctccgcgcgcgagtgccacgccgccggaccaccccagtcagcccgcggccgacagccctccgccagcaggggcgaatccgcggaaaggtcagcgtttttcctgacaatcggggcataggccgaacacctcaagggtatgcgactccaccgtgaacccatgcccgtcggccaccttgcgcacccaggattcgctcggcggatcgatctcgatcgtcttgccgcatttgcgacacaccagatgatgatggtgggcatcatcgccgcacaggcggaacagctgctgcccatccatgcgcacggtatccgccgctccggaatccaccagcgagttcaactgccgatacactgtggcgaggccgatgcgcagtccggaatccaccagcttgcgatgcagctcctgcgcggaaatgaaatcatcacagccgcgaagctgcgccatcacggcatccttctgcttcgtatgcctcaccggcccgttcgccatcacacgctcctcaagtattatcatttaacaaccattaatgataatagcgcaatccacggcgacatgcgagcgcgccgcacatacaacgaaacgaggggcggacgccgcagcgtcacgcccctcgctcccgaaccgccaaaactaccggagactacttgaggtcatcccagcagccggtggcctccaacgcctcgacggtcgccgcagtgtcatccgtgagcacggtgatatgacccatcttgcggttatgacgcacctgcgccttgccgtaatcgtgcacgttccactcgggatggtcggcaatcagcgccctcgtgggcgcgacatgctggccgagcacgttcaccatgaccgccgggctgagcagcttcggctggatcagcggccagccggcgatgccgcggatgtgcgcgtcgaactgatcgatcgagcacgcctcgatggtgtaatgccccgaattgtgcgggcgcggtgccagctcgttgacgacgacgcgaccgtccttggtgatgaacagctcgatggcgagcgtgccagccagctcgaagccgcgggccagggccagcgccatctcgtgagcggtgcgcgcgatctccgggctcacctcggcgggggcgatcgtcatatgcaggatgttgttgcggtggtcgttgcgcacgatcgggaacgtgacgtaatccttgccgttgccggacacgagaatcgacgcctcgaacgcgaaatcgacgaacccctccaggatggacggtgggaagccgccgccgcggtcgccgcggtcgcgaatcttctccaggtcgctgtcattgcgcagcacatgctggccgtgcccgtcgtatccgccggagcgggtcttgagcacgcacgggtaatgcaggtcatcgatggcggcgtcaagctcctcgaaggtgttgacctcacgccagggtgcggtctcgatgccgtgcctgttgatgaaggtcttctcgtggatgcggtcctgggtaacgcgcagcaggtcggtgccctgcggggccgcgaccaggtgacgcacctcgtcgatggattcggcgtcgacgttctcgaactcataggtgagcacgtcggacttctccgccagatcatggatggcggtcttgtcgtcgtactcaccgacgacctggaaatcggccacctgcgcagtcgggcagtccggcgtcgggtcgagtacgccgatgcggaagcccatgtacttcgcgctcaatgccatcatgcggccgagctgtccgccgccgatgatgccgatggtcgctccgggctgcagcatcttcaccgcgccatgggtctcctcagacaagctgggcattggattcggccaccttctccttgagagcgtcacggtattcctgcagcgcgtcggcgagacgcttgtcggtcgtgctcaggatctgcaccgccagcaggccggcgttcgtcgcgccggaattgccgacggcggtggtcgccaccggaatgccgccgggcatctgcacgatggacagcagcgaatcccagccggagagcgcatgcgagcgcaccgggacgccgatcaccggcagcgtggtctgggcggcgaccatgccgggaaggtgcgcggcgccgccggcaccggcgatgatgaccttgagaccgttgacacgggcgccgtgagcgaattcggccatcagttcgggcgtgcgatgggcggagatcacctgcttgacgtagggcacctcgaactggtcgagcatgtcgcaggcgtgcttcatcgtctcccagtcgctggccgatcccatgatcacggcgacttcgggcttgctgtctgtcataagaagaacctcctcttggataccgttacaactgtacaatcccctatatcctcaccacgaccttgccgaacacgtcgccggaaagagccttggcaaaggccgcgcgggcgtcggcgagcccgaacgtcgagtcgatcaccgggtgtatgtcggcatgttccacgaagcgcagcaggcgggcgaaatcctcgcgcgagcccatcgtgttgccctgcacgcgtatgtcctggaagaacacgcgggtgagttcggcgcccggctggtcgccggtggtggcaccgcagatcgcaatcgtgccaccggggcgcacggaacgcaccgaatgcccccatgtggcggcgcccaccgactcgatgacggcgtcgaccttgcgcgggaggcgcgctccggcctcgaacgcggcgtccgcgccgagggccagtgcacgctcgcgcttggtctcgtcgcgcgaggtgacgaacacctccagcccggcggcgtgggcgagctgaatggcagcggtcgacacgccgccgcctgctccctgaatcagaatcgtgtcgcccggtttgacgcccgccgaagcgaacaccagcgagtaggcggtcagccagctggtgccgagcgcggcggcctcgtcgagcgtcaggttcgcgggcttggcgaacacgttggcgctgggcacctgggtcttcgcggccatcgtgccggggtaccgctcggagaggatcgtgcgccgctcccccggcatcacgccggccccatcggcgccgatcacggtgtacagcacgacctcgtcaccggccttgagccccttgcgcacgggaatgtcctcgtcgagcacgccggcggcgtcggtaccgaggatcatcggcgtggcctccgctgcgagccccacgcccttgaggctccagatgtcatgatggttgacggtcgcggccttgacggacacggtggaccagaacgggcgaggctgcggctcgggcagctcccccacctccagcgcggccaaggggtcggcattgttgatcgttgcggcaaatacggccttcattggcccctccttgttcggggatatccatcgtcgataccattcaaccacgcgcacacgcccgcgcggaggccgggcgcggcatgcgcaacgggagcgggacgcgacagacggtacaggcggaacggagccgcaatgcctcccaggactcctgccgtatacggagatgttgggggcattttctcgtgccggcggcccgatgcgacggcatcgattatcatgtcgcttttgaaacatccgaggaaaggacatatgcgtatgagcgtcggcatattgagtgcgattcacggaccagccgacgtgcatgccctcgacgccgcggagcttccggcgctgtgcggtgagatccgcacgacgctggtgaggtacggccatgtccacggcgggcacatcggatcgaacctcggcatggtcgaggccactgtcgccctgcaccgcgtattcgactcgcctcgcgaccgcatcgtattcgacgtgtcgcatcaaagctacgtgcataagatgctgacaggccgcgccgccgcgtatctcgacccggcgcatcatgactcggtgacgggtttcaccaatcccgccgaatccgcccatgaccagttcgtgctcgggcacaccggcacgtcgatttccctggcgtgcggcctggcgaagagccgtgacctgacgggcggcatggacggcggcagcggcatacgcaatgtgatcgccgtgatcggcgatggctcgctcagttccgccatcgcgttcgaggggctgaacaacgccgccgaacagggcggcaacctcatcatcatcgtgaacgacaacgagatgtcgatcgcggaggatcacggcggcatgtacggcacgctcgcccgtctgcgcgctaccggcggcaagggtgggccgaacctgttcatggcgttcggactggactaccggtatgtcgaggccggcaatgacgtgttcgctctgatcgaggcgttcgaacaggtcaaggacaccgatcatccggtcgtcgtgcacatccacacgcgcaagggtctgggattgccgcccgccaaggaatccgcggaagcccgcgactccgggattcccatggagggtgacgccgcggtcgccgccgaggactcgatggtcttcgaaggacgacatgaggcgaaccattggcaggatcccgacagcacgaccgggcggcccttgggagcgcgcaagcattacgggagcatggcgatggcggcattggaaccgcggttcgccacggaacctggactggtggtcatctcccccgcgacgccgggctcgaacggcatcacccgcgcgttccgggaacgggccggacggcactacgtcgataccggcatcgccgaagagcacgccgtggcgttcgcctcgggcatcgcacgggccggcggacgaccggtgctggccacttccgcgacgttcttccagcgcacgttcgaccagttgcagcaggagctgtcgctgaacggcaccccagtgacgctgctcgacttcggcggcggactgtccggagccgacaacacgcattcgggcgcattcgacatcgccatgttcggcaacatccccgggctgacctgcctggcaccgaccagcggccgcgcgttcctcgacatgctcgcctggtcgacgagccagagcaacacctctccggtcgtcatccgggtgccgggcgacacgattctcaaccgggagcgctcgggcgacttgcctggcgacgcgcaggacgtcacggacatgggctccgcggacgatacgtgcagtaatgcgtgcagcgaaaagaccacggccgatggaacagccacctgcccgtggtcccgttaccgcacgattcgccgcggcacgactgtggcggtcctggcattgggcaacacgctgccgttgggatggcgcgtggtcgaggctctggcttcggatgtccggcatccccttgatgccacactgatcgatccgcagcagttctccacgctggatgccgcgacgctgaccgagctgaccgggcgccaccgcatcatcgtgacgctggaggatggacagctcgaaggcggctggggagacaaggtcaccgccttctacgccaatgccgggctgcgcgacatgcgcgtgctgaatttcggcgcggcgaaggagttcaccgatcgcgtgccgctcgacgcgctcaacgagcgttatggcatgaccgtcggcaacatcaccgcgcgcatccgcagcgagagccgaggctgaaagccgcgcttatcaggccccgtcaggcccacaaggacgtcgaaaaggaacagaaagcccgttggaaccttattgattccaacgggcttcaccgtgaccccggacgggctcgaaccgtcgaccttgagattagaagtcacatgctctatccagctgagctacggggccgaacaacgaaagaacagtgtaccatcaccgcggcacgttcagggatatgtgtccgcgggcggcgcggcaagtcatatccgccgccccctcaccagtggtcgggaaccactgcgccgcagtcggggcagcatccgtcgggtccgatgcggtcggacagtatcgcgtaccagtcgcgcacgatcaggctcgccccgcacgccgggcagaatgtggtgtccgctccagcagcgcgtaggcgagggcggcgaccgaaccggagtacacgtatccggcatgcggcacaatcaccgccttcggagccccctgcggcagacgcggcgcgagggacgacaccagtctgcgcgcatggttcatctgccggtcaatcatggcctgcagttcgccggcgttgaccggatagaacgcgccggctacggcggccgggcggacggtgccggcctccttgccggaatcggaaacaaccatcatcatgacgcctcctcacatctatctccatcgtagcctcgcgcggcgtcaacggctgcggggacgtggccggccctgcacgactccccacacgagccgcggacggaaccggcatctcctgttgcgtcgctaagtgcgcgccgaaacgacgagtacgcgcacataggaacgcagatgatcctgtttgcgtatcaaagtgcgcacggtcgtcgtttcggcgcgcacttagggacgcaaaccggccgacaacgtcgcgcaggccgcgcgcgaacaccacatggcagccaagcctccacccccgcaaggccctaatgcggccaaatacgccgaactgcgctgattttcgatgatgattcagcgtgtctcctcgcaacgttactatcagactatggggaatgacacaggacgaatgccggccgcggcgaacgacggctcgggcggcagtacggccggcggcagcccggacgccgccgccccctatgccacaccctctttcgcgcacggcatcgttccgttcgaccatgagatctcatcgaaccagcatctgacgttctcatacgccgagcaatcattcgcctcagcgaacatcccgtgggatccggatcatgacgcgctgcatctcaaggagcgcggcatgttcaccaacaccgcgctgatcatctccgaccaatgcccgttcaccatcaaatgcgcgacgttcgacggcgacgtcaaggcacccatcagcgagcgcatcgaactgagcggctccatgatcagacagctcaatgacgccatgacgttcctgaacgggcacaacagacgcgacgacggccgccaatgcccaccggacgcgctgcgcgaggcgctggtcaacgccgtgctgcatcgcgactacgcattccccggcccgactctggtcaacatcttcccaagccgcgtcgagatcgtgtcactgggtgggctgatggacggcatcgagatcaacgacctgctcaacggcatcagccagccgaggaacccccggctggccgaactgttcaccagactgggattcagcgagaattacggcaccgggatccgccgcatcatggaggaatacgacgaggcctccgacaacccgcagatccgcgtgggcacgtcctcggtggtgatggtgctgccgttgccgtcgcagccgtcgccgggtggatcgcgcacgcgcggcgacgccacaaagggcggctccgcacaaggcgccgacgggcacgacgccgcccaaggccacgcgaagatgtacgcattccccaccatcatgacgacggccaccagcgatccgaccgtggctctggccggcacacgcgtcatcgggtgcgtccccgtgcgcctgtcggacgggtcggcgctgcgcacgtcgccgctcatcgcgccgggacgcatcgcatcccccgcggcaaccgcccaactgccgccgaacgccggacagacgctcgaagaagtgaccctgcactgcatcgcacaggccggcgtgccgttgagccgccagcagatagccgacaatctcggcgcgaccaagaaccagatgacgtacgtgctgcatcatctggtcgagcagggtctggtcctcaaacgcggcagatcccgggccacgcgctacagcatgccctgacgcgggcgccggcggagactcccccaccgaaaattcaatttccgttcatctgcgctccaaccgcaggcagtcatcccctcaactcggcacagtagtctcaaggctggttccgaaacaaggagatagtaccgtgcaatcctcggtgggcgttcgcgaacgcatcgatcatgtgtatccttccctgcgtccggcggaacaggcggtcgcacgatacgtgcgttcccaccttgacgaggccgcggggctgacggtcggccagctcgcagaaatctcccgggtcagtcagcccaccgtcatccgtttcgcccgcaaactgggcttcggcggataccgtgagctgcgatacgtgctgcggcacccgcaggaggaacgctcggtgaccttcgacccgctcgaaggcttcgacctcaatccgtgggacaatcccgacgacgtgccgggcaaggccgtggcccgggcgaagacgctcatcgacgagctgcattcggccatggacggcaaggcgctgcacaaggcgacgacgctgctggcgcaatcgaggatgatcgacatctacggcgtggagaactccatgtctccggcgctcgacctgtgcaccaaactcacttatctgggactgcaatgccggttcaacgccgacgcctacctgcagcagatcggcgcggggcatctgacgaaggacgacacggccatcgcattctctcactccggcagctccgccgacaccgtgaaagcgctgaaactcgccaaatccgccggcgcgcacaccatcgctgtcaccaacaacaccggcaccccgttggccaactgggccgacgtgacgctgctcaccggtcgcggcgacatggcgatttacggcaacgccatcttctcgcgcgtggcgcacagcatcaccgtcgacatgctgtacatgagcgtgatcctcagcgattacggccgattctccaccgagctcgaccgttccggccgcatcatcgccgaccgcgagttccgcggctgaccgccatcatccgcatatccgcaaggttccataagactgcacaatacacgcaaggttccatgaaggctcgcgtggggctccgtgacgcccagcccattccaccccacccccgcaaactacagaactacgtgcatcagccgtaatcgaactcgttgttcactctcctttcccccaactttccaccagatcggaatccggccgccccgcgggagccgatgatggaatcacggcgagaagttcgtccgtgacacaactgaacaccggacgggatgccataggcatcacacgcaatggcgccgcatcaggcggcgcgacggaaggcaagcgacgaaatatgctcgactcagccgacggtgttaccgtagacctgcgcttgcaggtccttgcgagaggtctccaatttggtgatttcgccgagcagttccagtttttccgagccttcgggcatgccggccatgcgccggcgcgccgcggcgatgcgccgcatgtatcccatgtccagaagacgggccaacagttcggcggcgtaccgggtctcggcggggctcgccggacgcagctgcacggccgccgcattggcagcgcccggcacgccggatccggcgacggcccgatcctgatctgacggaggcaggggcagctgcagcaccgcgagctcattgatcaccgtcgtcagcgtcaatccgccggccttgttgagattatgcatccacaacccctgcggcgcatcatccggcggcaatccgcccgcggcctgaatggcgaggaacaacgcgcggaacaccggggcgacgaacgagtcctcgttgagcgacgcgaacatcgtgcggttgatggcacgcggaatctgaatcagcgtggccatgaactgctgctcgcagatgaacaccgcatcgtcgatgcggaaatacgactgctctgtggcggctcgatgctccaacgcccggcgttcggccggattcgcatacggattcgagccgggctcgacacgaggctggcctgcgccctcgccgttgcccgcgccgaaacgacgccggggcgaataggcgtcctcgtcgcgcacatgcagctggccgtgcgccgaacgcacctcgcgctgcatgatgtccagatccaccccgatgcggcgcgtcgccttgcgcgcatacaggtcacgctgcgaacgatcgcgaatctgggcgatgagcggcgccacggccttcaccgcgcccatctgcccggtggcatacgtggtgtcgaaccggccgatcgcggcatcgatcacaaaatcatacaacggcttcgcatgctcgatcagcgagcgcaccgcctgatcgccacggttgatgcgcagatcgcacgggtcgagattgtcgtcggcaacggcgacgaacgtctgcgacaggaacgccgaatccaatccgaacgcgtgcagcgcggccttctgccccgcggcatcgccatcgaacgtgaacacgatgcgcgagctcaatgcctgcccgggaacgttcagcgggccgaccagctgcaccgcgcccagcgaatcatcggcgaccagccgccgcacgatcttcgcgtgctcggcgccgaacgccgtgccgcaggtcgccaccgccgtatcgatgccggccagatgcatcgccatgacatcggtgtaaccttcgacgatgacgacctgacgcttcttcacgatggacgacttcgccaagtcgatgccgtacagcacctgcgtcttacggtacagctgggtgtccggcgtgttgatgtacttcgcggcgatctgatcgtcgtcatacagcttgcgcgcgccaaagccgagcgtgcgcccggtcgaatcacgaatcggccatgtggcgcggccgcggaaatagtcgtacacgccgcgctgcccctgcctcgcaagcccggcgtcaagcatctcctgctgcgtgaaccccttggacgcaagatagcgaaccagattgtcccacccctgaggcgcgtacccgcagccgaaacgctcgcagtccgcccggctgaaattgcgtccgccgagcagcttgcgcgcggccagagcctccttgctcatgatctgcgacatgaaaaaacgctgagcctcctcgttggcctcgatcagcctggcccgcttcgacccggaatgctcggtgcgcccaccggaattctcgtaatgcagctcgatatggtatttgtcggcgagaagctccaccgcctcgcggaaatcgatgttctcctgatgctcaacgtagccgaacacgtcgccgccgagaccgcagccgaaacaatgccacacgcccagcgcaggccgcacggagaaactcggcgtcttctcgtcatggaacgggcacaggccgacgaacgtgccggtgccggaaggccgcagcgtcacgctcgcggacacgatgtcgtacaggtccgcggcggcgcgcaccttctccacgtcttccttcagaatcattccagccatagcccaccagtctaacgtcagccgtgcctgaggccgccgcggccgtcacaagatcgaatgcaacgcaagggcggagctgtcggtgagggaggccacctggtcgaccgcgacgcgcaggcgctctccgtcgttcgtcgcctcgtcccaatcctgcaggagcacggcctccagcgcactggaagggcgcggagaatcggccatgagcacgtcgatgagatcgttgatgatctggcgttcctcctggtggaacggctcgtgctcgcgaggagccatcacgaagtacacggcgatgcccttgagcgccacgatttcgtagctggtctcctcggggatcaccacgttcgccgaataccgggtcagaggcccgtcgccgtacgtgtcgcgggtcgcgttctccaccgaccatgcgaagcgtccgatcaggtccgaggtgatgttcttcagttgcgccagcgcctggcgcgacccgtcgaagtggtcggggaacatgcgcagccgccgcagccttccgaacgcccgctccagctcgtcggcatcccatttcgagccgtaccatgagcgcgtcgcctcgatgatgcagccgatcattcgcgggtcggcgagcaccagtgggttgaacgcgccggtcgctatggcgtcctcgacgtcgtggacgctataggcgatgtcgtcggacaggtccatgacctggcattccatgggtttgcgggcttcgggagctcctgtcttcagccagcggaacacgtcctcgtcatccgagtacacgcagaacttcacgccgcggccaccgtcgtacttggccgcttcggcgagggtccacgggtatttgacggccgcgtccagcgaagccctggtcaggttcacgccggccgaccggccgtcggagtggaagaccttcggctccagccgggtgagcaggcgcagcgtctgcgcgttgccttcgaatccgccgatgccggcggcgatgtcggcgagcgcccgttcgccgttatggccgaaaggcgggtgaccaagatcatggcacaggcacgcgcaatcgaccacatccgggtcgcatccgagcatggctccgacctgccgtccgatctgggcgacctcaagcgtgtgggtgagcctggtgcgggcgaaatcgtcggtgcccgcgacgaggatctgcgtcttcgcgccgagcctgcgcagcgccgacgagtgcacgacacgggcgcggtcgcgctcgaaggcagtgcgcgatttcgacttcggcggctcgcccgcccagcgctgctcgtcgaatgcggtgtacccctcccctgctggtatgcgttcgccgctgtcctcggatttcatgggacctcccttgccgtcgccacgttccggtatccagtttagcaaagggttccttggacggagccggtcacgccgtcctcgcaatgcgtgcaatgtacgcgacgcgcggcgggtctacagcaggctcgccggatcgagcttggcgaggtccgcggcgggcagcacgtcggcggcatgcaggtagagcctcgggatgcgattgcgcagacaggtgaacacctcgtagctaatcgtgtcggcggcgcgcgcccagtcgtcggcggtcggctcgccgtattgctcaccgcgaccgggcccgaacaactccacggtgtcgccctcatggacgccaagctcggcggccgacccgtgcaggtcgacgatgaactggtccatgcacacgcgaccgcacacgtgcagcaggcgcgggccggcgctggtcatcacacgcacgggaccgccggccttctcgacatgcttggcgccctgcatgtcgaagccggacgcggaacggtggatgccgtcggcgtagccgaggggcacgatggcggtgctggtgttgtcgggcgtcaggtacgtgcgaccgtacgagacgccgtgcccggcctccacgtccttgaccgtgccgagctgcgcctgcaatgtcatggcgggcttcagatgccagtcacgcggcgtgcccatcgccgggtcgggctcgtagccgtacaggccgatgcccggacgggtcagttcgaaatgaatctcgggacggttgagcgtggccgcggtgtttgccagatggcgtatttcgggcgcgatgcccgcggcttccatgcgacgggtgaattccgtgaacgattcgatctgccggtcggtggaggcgacgaattcaggcacatccggcgagtcggcgaccgccagatggctccactggccgacgatgtgcagcacaccctcatgcgcgagcggcaccagcttggcaagggccgcgtcgaatccggccggcgtgaagccgttgcggccgaagccggagtcgaccttgacatgcacgcgtgcgggtttgccgagccggcgcgcggcgtcggcgagcgcgtcgatgcccgccagcgagccgacggagatgtcgatgtcgttgtcgatcagctcgtcgaacggcacatccatgccgttgtacacccatgtcagaatgcggcagcggtccgggccgatgccgagtttgcgcagcagtagcgcctcatgcgattgcgcggtgcccagccaggtcgcgccgcccgcgagcgccgccagcacggccggcagcagaccgtgcccgtaggcgtccgccttgaccacgcccatcaccgccgtgccggaatgcggaccgcccaccacatcgaccaagtgggccatgttgtccctcaacgtggccaggtcgacgatcgcctgcgcggggtaccggcgtcgcgccgcccggtagttggcttcgccagccggggatgaaaactgcaattcggatgctgcgttcaaagtcatggctcttattgtggcgcggcatgatgacgaatgccggagcgcgtcgcatgacggcacgaatccgacctcagccggcagcggcgttgtccggcgcattgccgtatgctgtacgacgcatattcgcggcgtccgcggtcgaccgccgccgcatcagattcccggcgttgaggcgtgccggggtcccggaacgccgtccggtacagcccaatccattccatatattgagagaagaccatggatctgtttcgcaagaaatcggtggatcagcttgtcgccgaatccaccccgctcaaacgcacgatgcacacgttcgacctgacgatgctgggcatcggagcgatcatcggcaccggcatcttcgtactcaccggcaagggcgcgctgaccgccggcccggcgttgatggtgtcgttcctgctggccgcggtctgctgcggcttcgccggcctgtgctatgccgaattcgcgtcgatggcaccggtttccggctcggcatactcgtacgcctatctcgcgttcggggaactgatcgcgttcgtgatcggctgggacctgattctggagtacgcgctgcaggcggccacggtgtccgccggatggagcggctatttcaacaagctgctcgaagggttcggactgcatctgccggtcgagctgaccgccgcgtacggcaccaaccccaatacgaccacatacttcaatcttcccggtttcgtgatcgtgctgctcatcacctgggtgctgtcgatcggcatcaaccagacgaagaaggccaacgacatcatggtgctcatcaagctcgcgatcatcgtgttgttcatcgtgtgcgtcatctggtatgtcaacccgtccaactggaagccgttcgcgccgtacggcatctaccagttccagcccggttcgacgcagccgtatggcatcgtgccggccgcgtcgatcgtgttcttcagcttcatcggcttcgacgcggtgtcgtcgtcggccgaggagaccgtcaacccgaacaggacgctgccgcgtggcatcctgtattcgctggtcatctccacgatcctgtacatcgtgatgacgctcatcatgaccggtgtggtgccgtatgagcagttcgcgcagttcatcgacgcgccggtggccggcgtgatcctgaagaccggcatgaactggctggcggtgatcgtcaacctcggcgcgctgatcggcatgaccacggtgatgctggtgcagctgtacggccagtcgcgcatctgctacgcgatgagccgtgacggcctgttcccgaagttcttcggcgacgtgcatgacaagtaccgcaccccgttcaaggggacgtggttcttcggactgttgaccgcgttcgcgggcggcttcatcaacatcaacgtgctgttcgagctggtgaacatcggtacgctgtccgcgttcatcattgtgtcggccggcgtgatgtggatgcgcaggacccagccggacgcgcatcgcgggttccgcgctccgggcgtgccgttcacaccgattctggcaatcgcattctgcatggtgctgatcgccggtctcaattgggagacctgggtgcggttcgcggtctggttcggcctgggactgatcgtctacttcgcctacagccgcaagcgctccaagctgaacgcatccgacgcggaataacgtgctcccgctggcaggggctgtcgcgaagcaactgggggtggtcttcacggccagtagtgcatcagaccaccctcggtctcgctgcgcgcgacagctcccgccagcgggagcacgttcggcgactgaggagcaacgcaggcgacgcgccgttgtttcgtgccgggcgttaccactcgtgacgctggtatgcgatccttgtcgtatcggtgggccggtcaagcagctgtatcaggccgcagcgggcgaatccgctggtttcgaggacgtgctgcatggccttgttgttggggtgggtgtcggcgcggacgttgccgtaatgcttgagggcccaggcgatgcagtcgcgggcggcatgcttgacgaggccggaggacgcgatgcggtggatggtgacgtaggaatcgtcgtcgagccaggcgccgtcgatgtgatggtaggtggggtcttcgccggggcatagcgcgaattgcgcgaggatgcgctcgtgtccgcccacttcgtcgacgagcagcatggcgcgtcgctgcgcgatgtcgtcgcgtacgacgtcgtctttggggaaggtgtcgccccattgggtggggttgccgttgcgtgccatcagctcgcgggcgcgcgcgtagttcttctgcatgtgcgggtagtcgcgcatggtcgcgtgtcggaatcgccgctgggaagcactgtcagtcaccggtcacctcatgttcgtgtgttggacaactggccgtaaggctatcatgggcactcgtccgattggagtgcatgtgccgtttaccgggagtcgttatgatgagggcggcaccggtccgataccgatgccgccctcatcccataacccgggccaatgccgggaatacggctgtgtcggccagtcccagtctcagacgaccttgcgctcgaacgggtcggagctgatgcccttggcgaggatgtccttgcaccactccttggcggtgaacaggctgtggtcacggtagttgccgcagctttcgatggtcgtggcgggaacgtcgtcccacgtggccttgtatgcgatgaattccagcgattccttgagggcgcgggccacatcctcggtggagtgcgtgccccaggtcagcaggtggaagccggtgcggcagccgaacggagagcagtcgatgtagccggggatgcgttcgcgcagcagcacggcgatggtgtgctcgatggtgtgcaggcctgcggtcggaatcgcgttctcgttgggctgtaccagacgcaggtcatagttggagatcacgtcgccgttggggccggtctctgtgtcgatgtaacgcacgtacggcgccttgaccttcgtgtgatccagctggaaactttcgacaatcggcttttcttctgccatcgcagactccttttgctcgatatgacgccggcgcgtacgaccgttagccggcattccatcgaccattgtctcactatcgcgcgcgtctcgccgcattcttggctataggcgttcctcatatacggcatatacggcacgaggcgagtccggtgcgctgtaacggcgctgtcaatcgtcgaagccggcgatggcctccatgaatcgcttgccgtatttggccagcttgctgtcacccacgccgttgacggcgaggaactgcgcgtcggtgatggggcggagacgggccatgtctcgcagcgtgcgatcgttgaacaccatgtatgggggtaggctgttctcgcgggcgatggacagacgcagttcgcgcagtttctggaacaacgtctcgttctcgtcgtcgggggcgtacgagcccaatgccgggccgtccgacgccgcggatttcgaactggaatcggtccgtgacgtcacgcccgttccggcgccggcggccttgcgctcgacccgtttgatctcatatcggaattcgggcgcgaccgtttccgccgcgcgctgcccgaagccgacgatcggcagccgcccttcggcgatggagaggaatccgtcggtggccatctggctgagcacgtcgcggattcgggcttcgggcgcatcgtgcagacgaccgtagctcgggcacctgtcaagatgccgcgcgatgaggtccttggccttggagccgcgcagtatcgccacgattttccccgagccgaggccttggcgcacggggccgcacgtcggtcgcccctgatcgtcgtaatcgtacatggcatcgtgcacgcatcggctgattgaccgcgcgatgtcggtcacgtcaagggtttcgaacgtgctgtcgcaattcgtgcaaccgcccgtgcatgtgccggttcttgacgtgttctcgccgaagtagcgggtcatgtagacgtgcaggcagtcggtggtacggcagtagccgatcatgccgtccagcagacggcgcttgctcatgcgcacggtctcacgctcttccggggtcagccgttcgttgtcgttgtccatgtcgagcaggcgccgacgggtgacgatgtcggattcgttccacagcagtgtgcatcggctcggctccccgtctcggccggcgcgaccggcttcctgatagtatgcctcgatgctttccggcatgttgtggtggatgacgtagcggacgttcgacttatcgatgcccatgccgaacgcattggtagcgacgactaccggcacggcgtcggtgacgaagtcgcgttgcgcctggttgcgtacgtcggccggcattccgccgtggtaggcgaccgcggcggggccatcgcgcatgacggaatctgccgcactgccgcccgccgctccgcgcaacgccggcacggtgtggttgagggccgcggcgagtgcctccgtctccttgcgcgtggcgcagtagacgatgccggattcgtccggatgctcggctacgtatcgtgcgacccatgccgctttgtatttggtctcgatcttgagcacgtcgaagtacaggttctctcggtcgaatccggtgacggtgacttgcggggcgttgagccccaggataccgatgatgtcgcggcggacgcgctcggtggcggtggcggtgaacgcggctacggtcggccgggccggcaggccggcgatgaactcgccgatgccgaggtacgacgagcggaaatcctgcccccattgcgacacgcagtgggcttcgtcgacggccaccagcgagataggcacgcgcgtgacgaagttgcggaaccgttcggtttccagtcgttcgggggccacatacagcagtttgatgtcgccctgcgcggcctgtgccagcaccatggcctgctcgtcgccgccctgcgtggtgttgacgtatgcggctgggatgccggcgtcgttgagcgcgtcgacctggtcgcgcatcagggagatcagcggcgagatgacgatggtgacgccgggcagcagtgtggccggaatctggtagcacacggattttccggcgccggtcggcatcacgccgagcacgtcgcgcccggcgaggatcgcgtcgacgagccctgactgccccggtcggaacgagtcatagccgaaataccgtttgagcgcccccagcgccgccacctgatctgtcatgcctcccaacattaccgcattccggccgccgtctcttcgagtacagcgtcgggactgcctctctccccctctctttccttctccgtcgtcccaaaagcgtcgctaagtgcgcgccgaaacgacaagtgcgcgcacttatggacgcaaaccgggccttgcatgcatgcccgtcggcgtgccgccgaatcagatggcggcgaaggcctgttcgaggtcggcgatcaggtcgtcggcgccttcgatgccgacggacaggcgcaccaggttcgcgggcacctccagcgtggtgccggcgacggaggcatgggtcatcgcacccgggtgctcgatcaggctctccactccgcccagtgactcggcgagcgtgaagatctgcgtggcaccggcgaaccgcttggccgcctcgaaaccggccgcgagctgcacggaaatcatgccgccgaagccgccgtgcatctgacgggcggcaatctcgtgacccgggtgggattccagtcccgggtaccacacgcgctccacttccggacgggtttccagccattgtgcgatcttcagcgcgttttcgctgtggcgctgcactcgcacggtcagggtcttcaggccgcggatgtccagccacgagtcgaacggggatggcaccgcgccggcggcgttctgcaggaacgcgaccgcgtcgcgggtttcttcgtcgttgagcacgatcgcgccgccgaccacatcggaatgcccgccgatgtacttggtggtcgaatacacgaccgcgtcggcgccgtcgtcgagcggatgctgcagcaccggggaagcgaacgtgttgtccaccacgaccttggtgccgtgccgatgcgcgacgtcggcggtcgcggcgatgtcggtgatgttgagcagcgggttggagggcgtctccacccagatgtaccggtattgcttggcttcaagcgcggcggcgacggcggcagtgtcggtgatgtcgaccacgtcgagcccgatgccccacggcacgaacaccttggcgagcagacggtaggtgccgccgtacacgtcgttgccgagcaggatgttgtcgcccggcttcagcgtggcccgcagcagcacgtcaatcgcggcaagtccggaagagaagctcagcgcgtatttcgcgccttcgacggcggcgagctgcgcgtcgaagctgtttcgcgtggggttgacggaccggctgtaatcgtagccgttacgcagtccgcccacaccgtcctgcttgaacgtggaggtcatgtagatcggcgtgacgacggcgccggtggtcgggtcgggctcctgcccggcgtggatggcacgggtggcgagcgtggtgttggcgagggctgcggcgttggtggagatggtgatggtcatgatggttgtttccttatattgcagtttgctgtattgattcgatattgaaatattgaagttcgggttcgcggacgcggttcaggaggggctttggccgggccttacaggtactgttcggcaagtgatggcctggaggtccgctcgacgatgtcgccatagccgttctcgcgcatccagtcgtcgttgaagatcttttccagatagctgcggccggagtccggcagcagcacgacgactacctgattgctgtccagatcgtgctcacgcgcgtatttcagggcgctgacgacggccatgccggacgagccgccgacgagcagtccttcctccgcggccaggcgacgtgtcatctcgaacgcctcgcgatcggtgacctgcacgatatcgtcggtgatgttccggtcgaacgccttcgggtagaagtcctcccccacgccttcgatgtcgtattggtgcacgtcgctcgggtcggagtagatggagccttccggatcggagcccacgaccgtgaccgcgccgtcagaaacctccttgaggtatttgccggtgcctgagatcgtgccgccggtgccgatgccggccacgaaatgcgtgaccttgtggtcggtggcttcccagatctctgggccggtggtgtagtagtggctcaacggtccgttggggttgtcgtactggttcgggcggaatccgccgggaatcgtgttggcaaggcgctcggcgacctgatagtaggagcgcgggtcgtcggggcccgcatcggtgggggtgacgacgacttcggcgccgtatgcgcgcagcacggcacgcttggattcggagactttgtctggcagcgtgaagatcgtacggtagccgcgctgctgtgcgacgagcgcgagcccgacgccggtgttgccggaggtcggttcgactatcacaccgccgggcttgagttgtccggagcgttcggcggcgtcgatgatgcgctccgcgatgcggtccttggaggatccaccgggattgaaatactccactttgacggcgatggtcgccttgatgccgtcagtgacgtgatgaagctttacgagtggcgtgttgccgatgagttcggaaagactgttgtgaatggtcatcgtggatcctgtttccttctgcgtttcgattggtgcgttattcggtttcgtataccgggcagatgggttgaacgcagttgaaacaggtggatggtgatcgtcgatgatggtgttggtctttgccgtcccgttgtatgacctgctacagatattgttgtgccaatcatgcgacatcggggaatcatcaggaatgaaccgtatttcaagtatgcgtcgtcaaccgctcgcccgcaggcgtcggtcagcgacaacaacatgaaaaatacgtcatgtttgacatagtatcagcatctcagaaagacacgcgacagcgcatccacaatgtgatatcagatgactgccgtcattgcgctagcccataaattgcatagcggcgtgagtggacccatcgaatgtcatttcgacgaatccactcacgtaccggctagtctttcacctgttcgtacacttgcgcaggtgtcagctctgatggaagctcatcccccgaatctacgttgactcgctcaaataccggctgccatgcatcagaagcgttaccatgttgagaccgcaaaacgttccacgattgttgcgtatcgtcggtcactcggtatacgccggcagtcgcaccggtcacatagtactgagatgactgttctccaggcaaatcggtcggcgtaagaaacaacatgaccacgtcaccggtctgcagcagagtctccgcgctcccctgctccgcggaaccagtctgacgtacaataatgctgccactgttgacggttcccttaagcgtctgcgagaccttcacgtcaagtaacgtgaaatcagtaatatcatcaatatcccgaatcacggaagttctcgatatttctccggtaataatcaggggactatcgtcctcaagttctaccatggattcataaatgcgtacccgcgactgagaagcatccggcttgggaacattagattgtgccgctgtctgaccgcaacccgcgcacgtaaacatcaacactaccaaccccataagggtcgttagccatctaatccttgaaatcttcttcatcgtgtcacctcaatatctactgttaatacctttgatatcatctgacgtgagatatctgacaccattgttgtaagcgtcagatgcactcttgtacatcactgtattgatcgtagaatgccccaatccccaacaatgagaaaactcatgaagccaaagcactctcatgcgggcaaccgggtaagatgacttcatataataggtatttacacgcgaaaccgcgtctttagtatacccggacgctaaaaatgtataggccgattgtccttcccacccattcttgccgaaattctgagaagttgcctgccaaaccatccgcgttccggtcgagaatccaactttcgttgctgaattaatattggagacagcctgcttggccgaagtcaagtaattgcctttcaccgtggccataagcattacaacctggttcttattgagccaatgactcttgctataagaataggcactcgcgactggcaccatgctcatcaaaaataagaatgacaatagcgttgatactaaacttattggccacttcctgcagcgttgcagcttagacatcttcgcacctttctgataagaacggaaagttacagagacaggatttatatccgtgaagtagcaacacagcaacctatgctgttattaatttataatactcgatttataagaagaaagcaaaaacatacacaagaaggacccccgggggttgtttgcctcgtccgggggtccttgtcgtgtggtgcggcggcgtgctactctcccacaccctgtcgggtgcagtaccatcgccgtgccaggtcttagcttccgggttcggaatgggaccgggcgtctctcctgggccatggccgccgcaaatcttgggttatcggccgggaaacgggggtttcccgccggcgtgtggcggttcggggaccggacaatggacgcgattcgttgctgttgactgatcgtgcgcgtgtgaggaccgtgctccctgtgcgccttcgcggggccctgccgggtcctgcgccacacaccctcgcgggcgtgtggatgtgggttgcctctcgaccattagtaccggtcggctccacccctcgcggggcttccacgtccggcctatcgaccacgtgttctgcatggggtcttcagcggctcggggccgcatggaatccttatcttggagaaggcttcccgcttagatgctttcagcggttatcccttccgaacgtagccaaccggccgcgccactggcgtgacgaccggcataccagaggttcgtccacccaggtcctctcgtactatgggcaggcctcctcaagattccaacgagcgcagaggatagagaccaaactgtctcacgacgttctgaacccagctcgcgtgccgctttgatcggcgaacagccgaacccttgggacctgctccagccccaggatgcgacgagccgacatcgaggtgccaaaccatcccgtcgatatggactcttgggaatgatcagcctgttatccccggggtaccttttatccgttgagcgatgccgcgcccgtgcgccggcaccggatcactatctccgactttcgtccctgctcgatccgtcgatctcgcagtcaagcccgcttgtgcgattacactcgacacccgattgccaaccgggccgagcggacctttgagcgcctccgttactctttgggaggcaaccgccccagttgaactacccgccaggcactgtccctgaacaggatgactgttcgaggttagacatcaaacgagaacagagcggtatttcaccttgcggctccgcggatgctggcgcacccgcctcgaagcctcccgcctatgctacacaatccgcgcctaatgccaataccaaggtatagtaaaggtcccggggtcttttcgtccttctgcgcttaacgagcatctttactcgtactgcaatttcgccgagctcctggtcgagacagtggggaagtcgttacgccattcgtgcaggtcggaacttacccgacaaggaatttcgctaccttaggatggttatagttaccaccgccgtttaccggggcttgaattcaccgcttcgcagaaagctgacggatcctcttaaccttccggcaccgggcaggcgtcagagcgtatacagcggcttgcgccttcgcacgctcctgtgtttttggtaaacagtcgctaccccctggcctgtgccaccccccgccgctcatcaccgcagggggtctcccttatgccgaaggcacgggagcaatttgccgagttccttgaccaggattcgctcgatcgctttggtattctctacctgaccaccagtgtcggtttggggtacgggcggcaacgcgcctgacgccgaagcttttctcggcaccacggatcaccggattcgggccgtaaggcccccatcatcacgcctcgccccgacgccccgcggatttgcctgcgggacgggctcgaacgcttgaccacggaaaaccacctccgcggccggctgccctgatgcgtcactcctgcgctgacctactacgaggggggatcccaacgcgcccgcgccgcgaccccccgaaaggggagacggcacggacccggaggttagcgccccaggcctcggttgtttcggttcgctgccggtacgggaatatcagcccgttcatccattcgactacgcctgtcggcctcgccttaggacccgactcacccggggacgacgaacgtggccccggaacccttggtcatccagcgggcgggattcgcacccgcctctcgctactcatgtctgcattctcactccccaacggtccacggcaggcttgcgccgccgcttcgccccgatggggacgctctcctacccagcatccaaacggacgctgccgcgtcttcggtggcgtgcttgagccccgctacattgtcggcgcggaaccactagaccagtgagctgttacgcactctttcaagggtggctgcttctgagccaacctcctggctgtctatgcgactccacatcctttcccacttagcacgcgcttggggaccttagacgacgatctgggctgtctccctttcgacgacggagcttatcccccgccgactcactgccgggatacgcgtcacgggtattcggagtttggctgctgtcggtacccgatacgggccctcaagcatccagtagctctaccccccggacgtaatccccgacgctgcacctaaatgcatttcggagagaaccagctatcacggaatttgattggcctttcacccctaaccccaagtcatccccccggttttcaacccaggtgggttcggtcctccacgcggtcttacccgcgcttcaacctgctcagggctagatcatcccgcttcgggtccaggacacgcgactcaaacgccttttgagactcgccttcgctacgcgtaccccacacgggttacgctcgccacgtgccactgactcgcagactcatttttcgataggcacgccgtcaccccgaaaggctccgacggtttgtaagcgcacggtttcagagactgtttcactcccctcccggggtgcttttcacctttccctcacggtactagttcgctatcggtcagacaggtatatctaggcttaccccacggtcggggcggattcacacgggattccacgagtcccgcgctacttgggaaacacgatccggagacgacgcgcgttcggctacggggccatcaccctctgcggcccggcattcaatccggttcgcctcacacgccgttttatcactccggccgggcccgccaggacccggacacacgctccctcaacaccacgcgcgcaacggctggcgcctgtcacacgcgcgcggtttggcctgatccgctttcgctcgccactactcacggaacatcctttcctgcaggtactgagatgtttcacttccctgcgtaccccccgcgcgaacgcggtgccggcccatgacggccggcgggttcccccattcggaaatcctcggatcaaagccctgctggcggctccccgaggcatatcgcagcctcaaacgtccttcatcggtactgtctgccaaggcatccaccatacgcccttgcaagcaacccgcacgacccatccgggaacggcgggaaaccgcaagcccacggcaaaaactccgctggcaacacaaatcatcacacaaatgatcacacacaaaacgatcaaacaccagactccgaagagtccggcgaaatcaacagcagaagacacccccaaaagggcgtcccctgctcgcgtccactatccagttctcaaaccaccacgcacccgcacgcgagcccacccaccccaccaggggacgggcgaccggcacggggcacggaacaccagccacgccaaacggcgcggggtggcggtccgggaacccaaaagcatgcccgcaccactcctggacgcaccgcacgaccggcacgcccgaaggccgactccactcttccacaccagcaacccccgcgcacccggcacatccggggcaagggggcacacaccggccaccagacagtggcctgaaatctccgtagaaaggaggtgatccagccgcaccttccggtacggctaccttgttacgacttagtcccaatcacgagcctcaccttagacggctccatcccacaaggggttaggccaccggcttcgggtgctgcccactttcatgacttgacgggcggtgtgtacaaggcccgggaacgcattcaccgcggcgttgctgatccgcgattactagcgactccgccttcacggagccgggttgcaggctccgatccgaactgagaccggttttcagggatccgctccatgtcgccatgtcgcatcccgctgtaccggccattgtagcatgcgtgaagccctggacgtaaggggcatgatgatctgacgtcatccccaccttcctccgagttaaccccggcggtcccccgtgagttcccaccataacgtgctggcaacacggggcgagggttgcgctcgttgcgggacttaacccaacatctcacgacacgagctgacgacgaccatgcaccacctgtgaacccgccccgaagggaaacgccatctctggcgtcgtcgggaacatgtcaagcccaggtaaggttcttcgcgttgcatcgaattaatccgcatgctccgccgcttgtgcgggcccccgtcaatttctttgagttttagccttgcggccgtactccccaggcgggacgcttaacgcgttagctccgacacggaacacgtggaacgtgccccacatccagcgtccaccgtttacggcgtggactaccagggtatctaatcctgttcgctccccacgctttcgctcctcagcgtcagtgacggcccagagacctgccttcgccatcggtgttcttcccgatatctacacattccaccgttacaccgggaattccagtctcccctaccgcactccagcccgcccgtacccggcgcagatccaccgttaagcgatggactttcacaccggacgcgacgagccgcctacgagccctttacgcccaataaatccggataacgcttgcgccctacgtattaccgcggctgctggcacgtagttagccggcgcttattcgaaaggtacactcacccgaaggcttgctcccaaacaaaagaggtttacaacccgaaggcctccatccctcacgcggcgtcgctgcatcaggcttgcgcccattgtgcaatattccccactgctgcctcccgtaggagtctgggccgtatctcagtcccaatgtggccggtcgccctctcaggccggctacccgtcgaagccttggtgagccgttacctcaccaacaagctgataggacgcgaccccatcccacgccgatagaatctttcccacaatcacatgcgatcatgtggaacatccggcattaccacccgtttccaggagctattccggagcatggggcaggtcggtcacgcattactcacccgttcgccactctcaccaccaagcaagcttgatggatcccgttcgacttgcatgtgttaagcacgccgccagcgttcatcctgagccagaatcgaaccctccacaaaaaaaacgaaagggaaccattgatgaccccaaaaattgacgcgacttcttaataaggaaaagaagtccgcacgaaaaaccccggcccccatcaagcgccctcgcgcacccacgggcaaacacccgcaggcgggaaccggactggcataaaatcaaccaaaaaagtagtacaaacacactcttgagttctcaaaccaccacacatcaacaagcttcgttctcaggaggagaagtccgccgtgctgagcagcaagagataaacatacacgggatgggcgaacaacgcaaaccgatgggcgcaggaaagctaggaaccgttgcaatgacgcggttccttcggcgtgtcgcaaaagcctgtttttggccttctgataccagaatagacctcgaataccgctccacacggcactacactcactgtatttcggcgtgtcgcggattgttcaccgcccattcaccgcgtccgcgtcgccgcatgccgggtacagcgcgttctaatgtttcagtatgaacgaacgaaacatcatcgaaacccaaccggagcgcacggatctgccgctcatcgtgattcccgtgatcgtcgaatcaatgatcgagccgttcgccgccaacttccccctgctgcacgatatcgcccgcatccgcatgcactgcgatttcacgctggacaccgacaccatcctcgaacgcaccaaggatgccgaagccgtcatcgtcatcggcttccacatcaccgatgacatattggacgcgatgaccgttcggggccatgtctcgtgctttgcgttcggcggcaccggcgtcgccagctacatcaatcttcccgtcgcgcgcgagcgtggcatccgcgtgtgcaacgtcgtgcattacggcgaccatgccgtggccgagcacgcattcgccctgatcatggagctcacccgacaggtcggccggcttgacgagcaggtgcgccgcgacgactggggaggcatcgacggcatcgggctgcacggcaagaagctcggtctggtcggtttcggcggcatcggccggaccgtcgcccgcatcgccaatggtttcggcatgaagacactggtatggaacagccatgtgcacggcatcgatgggttggacatcaccctcattgacgatatggatgaggtgttcgcgcagtcggatatcatcagcctgcatctgccgctgctcgacggcaccgcaggcatcatcacgtctcggcagctcgaccggatgcgccccggttcgatgatcgtcaataccgcccgcgcagaaatcattgaaccgggggcgttgacccgccggcttcaacgaggcgacgtgcgtgcggccatcgacgtgttcgaccatgagccgctgccgatggacgacccgctgcgctccttggacaatgtcgtattgacgccgcatgtggcatggcgtgacgacgaggcctgcgtcaatctgacccgacaggtgatcgacgcggtggcctcgtatttcactggcggcgactataacgccgtgctgtagcaccagtcagctgtggcggcgcttgccgcggcaccgctacagtgaggcggcttcgataagacgagccgtatattcggacttgggatcgcccagaatgcttgcagtggagccgacctccaccacatgaccgtcgtgcagcacgagaatacggtccgctatatgctgcacgacgcccaggtcgtgcgaaaccatgatcagcgccgtggacggcctggcctgtcggatcgcggcgaacgtctccaggatctgcatgcgagccggcacatcgatggcgctcatcggctcatcggcgagtatcacgtccggctcggtgatgatcgcgcgggcgatggcgacgcgctgcgcctggccgccggacagatccatcggatatcggtcgatgaacacgccggcatccaatccgacccgttccagcgccgcgtgcacgttctcgcgaatgcctgcggggtcgggcctgctcccccgccgtcgcagggacaacggctcggcgacgatatcgccgaccgtccatctgggatccagtgatccgtagggatcctgatatatcagtccggaatcgtggcgcagccgccgcaaaccggagccgccacgcagcaccggcgtgccgcggtactccacagtgccgccatcggcgttccccaaccccagcatgatgcgggtcaacgtcgacttgccggagccggagccgccgatcacagcaaggcactccccctcatatacgtccacgtccacgtcgaacagcacctgatgcgcggcggcgcgccggccgaacgacttgcagatcgaccgcgcgcccaatacgacggcgggcctgtcgagtttccgctcggaaccacttgttgacggttccgtcatggagggtgacgcggcaacttgggatatacggaaatcgctcacgatgactgctccttatccccggcatccccggcatgcaatgtcagttcccgggcagccccgaccagccgccgcgtccgctcgtcgcgcggcgaggcgagcacgtcggcggtgcgccctgactccactatccgcccttcgtcaagcacatagcagtgcgtcgtcgcgtgggccagcacggcgaaatcatgggtgatgaacagcagtgacgcgcccatgtcatcgaccagggagaccagcaggcgcacgatctgccgctgggtgatcgaatcaagcgcggtcgtcggctcgtcggcgatgatgaaacgcggagaggtaatcagcgcagtggcgatgccgacgcgctgctgctgcccgccggacaactcgtgggggaatttgccgaggacgtcgtccggcagcccgaccttgcggatcatcgcacggacacgctcccgacgctcgacggcggtcaggtcataatggagccgcagcggtagtccgacctgcttctccacactcatcaccggattgagggatgcggccggattctggaacaccatgccggcgtaacggccacggatgtcggcaagacgcctgtcatccgtaccgaccgtctccatgccgcccatcactaccgagccggacaccacggcatgcgtcggcagcaggccgagcatcgccttggaaatcatcgacttgccggagcccgatgcccccaccaggccgacgcgctgcgcgtcggcgatatccaagtcgacgccgcgcacgatgggcgcaccgccgatggcaatgttcaggtcacgaaccgtaacgctcatcgcgcacctcgcaatcggtgattcgtcaatgggtcggcggcgtcgcgcagcgcgtcgccgaacaggttcaacgcgaccaccacgagcgtgacgatcagccccggccacagcacggtcagcgggtacacgttgatgaacttcacggacgtggccagggagtgcccccaactgggcacgcccgacggcacgccgatgccaaggtacgtcagaccgctttcggccaacaccgcggtgcctgccgacagtgacagctgcaccgtcagcacaggcgagatattcggcaggatatggcgcgccagcacgttcagtcccgaagcgccgttcgacagcgccgactcgacataggacgaacgcgcggcgagcatcgcctgagggcgggacacgcgcgccagattcaacccgtatccgaatccgcacgcgatcacgatgacggccacggacggaccgagcggcacggcgagaatcagcgcgatcagcaccgtgggaatggatatcagcgcgtcgacgacgaccaccgatgccgccgaaagcgccgcgtgtctggacaccatcaacgccacgatggccagtccgaacaccgcagcgacggccacggtcagcacgacgatcagcaggttggtgcgggagccggccagcaaccagctgaacacgtcggcaccggtgccgtcggttcccagccagtggtcgcgcgacggcttcgcccacacatggtagccgtcggtgctccacagcgaatacggggtccagaccagcgacaccgcggatgatgccagccataggccgagcacgatcagcgagaacttgcccgcggcgtggccccacatcgtacccagaacgacacgtgcggcgcacacgccgcgggcagtgcgggcacggtcttgcgccgtcgtcgcgctgttcccggaagacggttttccggctccggcttgagtcttggcatcgatcggtcgcgtcatgcgttcacctccgtgacatcgtcagccgacttcagccgcgggtcaagcacccgatgcagcaggtcgaccagcaggccgatcagcaggaaaaaagccgccagcatgaacagctcgctctgcacggcgatgagatcacggttgccgacatcggtcaccagaccgttgccgatgcccggcagcgcgaacaggttctcgatgaccatgacgccggtgaccatctccgcgaacgtcagtccgatgacggagaccagttgcggcatggcgaggcgcaatcccacgcgcagcaccgcctgccggcgggtcatgccacaggacatggccatgtcgatgtaaccggaggatgccagtccgcccaatgccgagcgggtgtaccgcatcagcccggcccccacgatgatgcccaccgagcaggctggcaacaccagcgacatcagcgccgaaccgaaatcggaccacccgccttgggggaatccctgcgatggaaacacgccaatcagtccggttccacgcgagaacagcaggatcagcagcagaccaccccacagcgcgggcacggcgccgccgatgatggcgaccatgtgaaacatgccgcgagcggcgcggctgcgggccagtgtcgcctcgcatcccaacggaatgcccagccccatcgcgataagcagcccgaggacgatcagcgggaacgtcaccgatgcccgctcgccgacctgggcgctgatggagcggccggtcagaatggaggtgccgaaatcaccgtgcagcaacgcgccgatccagtcggcgtattgcgcgatcagcggccggtccagaccgagttgcgagcgcagcgcggcgacccgttccggcggggaattcagcccggccatcactgaggccacgtcgccgggcagcacgcgcaatgccgcgaacacgacgatggagatgccgaacagcgccgccacgaacagcagcagacggcgtatgacgaatcgcaagtggactccttccggtgagagcgccgcgcatcccgtcacagaccccgaccccgacgaccggaatcgcctgtgtcgggatacgcggcgatttcagccgtcacttggtgtaggcgacgttgtacagcggcaacagggtctggttgaggttgatcgggaagccggtgacgcccttcgcgtacgcggtggtgacgcggtagttgaacagccagtcggcgggggcgtcttcggacaccttgcgtgcggcttcggcgagcagcttgtcgcggtcgtcgtcgttcgtggcggcgacggccttggcgtacagggcctggacctccttgttgtcgtagttgtagtagtaggtcgggtcggcccactggtagaagtcgtggctttcgttgtggtcaacgagcgagatgtcgtaattcctgttcgtatacacgtcctgcagccacgtggagaattcgaccacgttgaccttcaggtcgatgccgatcttcttgagctggctgcgcagctggtcgccgatctcggtgccgtatatgttcgcgtaggtcaggctcagctgcagcggcttcgattcggagtatcccgcctcggacatcagcgacttcgccttgtcaaggtcgtacgggtagatgccggtcaggtcctcgtagccggggtcgagggaggggatcgggccgccgagggcggtgtccgaaccgccgcgcgaggcgatgatctccttatggttgatggcatagcgaatcgcctggcgcacgcgcttgtcggaggtcttcgctccggtgccgttgaacgcgagcacgaatttgtcggtgtcgtcgccggccttgaccacgtaatggtcgctgtccttggtgaacggttcggccaggttctcgctgatcggcgcgagcacctgcacatcgccggacttgagcgcgttcacggccgcgttgtcgtcggtgaaataccgcacgacgaccgtgtcggtcttcgccttgttggcgccccagtagttggggttcgccttgagcgttatggacgagttggtgacgaacttctcgacggtgtacgggccggagccgatcgcctgggtcttcgcgtcgtatttcgcgtccttgtcgaacacgagtccgggacggccggtcagcacccacagcaggttcgcgtacggcgcgctgagcttgagttcgacggtgttcgggtcgctcgctttgacggagacgaagttgaccagcgaatcggcgtcatggtactgcttcgtgacaagctcgttgatggaccatgccacgtcgtcggcgtcgagcttgtctccgttcgagaacgtcatgccgtcgttgagatgaaacgtgtatgtggtgccgtcgtcgctgacatcccatgtcttcgcgatggcgggtacgacctgattgtgctcgtcgcgcgccacgagtccctcgtagacgttgccgatgagtacctggtcgatggccgatccggcggtgttgcggatgtcgaggttggtgggcgcgagtttcaacccgatggtgaccgtatcgttcgccttggcgcccgtcgtgtcgtttttgcgtccggcgaacgccgcgatgcatcccgcgacgacggcgacgaccgcgatcacggcgacgatggcgacgatccaccatgtagcccgccggtgcccggcggcgttcttggcgcggctctccagctgcgcgtccatgctggccgcggcgctctcgttcgtcgcagcggtttcctgtgtgttcagatcttcgttgtcggttgcgccggcgtcgccgtgcgcaccatggttttcagtcatgattcctcttcatttgtattgtgatactgcggctggccgcccttgcgggtcgtccgccacaggacattgtagcgtcaggtcgaacctgactcgcgcggatgccgcgctggcgttctatcatgggtgaaggcatccgttcatgatgcgcccacgcatcacgattcataaggggattcgcatgctcgtagcggtcgacatcggcaacaccaacatcgttctcggcttcctggacggccacgacatcatcggcacctaccgaatcacgacgaaatcgaaccacacgtccgacgagtacggcctgatgatcacgcagttcctcgcgctgagcggtctgcgtccctctgatatcgatgacgtgatcatcgcgtccgtcgtgccgaaggtcatgcactcgttccgtgcaagcatcatcaagttcctgaacatcaatcccatggtggtcggccccggaatcaaaaccggcatcaacattcgcatcgacgacccgaagtcgctgggttcggactgcctcgccgactgcgtgggcgcgtattacacgtacggcggtccggtgctggtcgccgatttcggcaccgccacgacgttcaactacgtcaatgacgagggcgtgatcacctgcggcctgatcaccacgggcatccgcacggccgcggcggccttgtggggcgagacggcccagctgcccgaggtggaaatcaccaagcctaaatccattctcgccacaggcacgaagaccgcgatgcaggccggactctactacaacttcctcggcggcatcgaacgcacgatccggcagttccgcatggagctggacgagccgttcaccgtcgtggcgaccggcggcctgggccgcgtgttcaaggatgacacggagctgatcgacgtgtatgaccccgagctgatcttcaaaggcatggcgctgatccacagccgcaactcgcatcgctgaatcgcgcgggcaggcagcgggttcgcgtgaccggcttcggcattggccacgccggcgcaggtcatttgatggtgaagccctgattgacgccgtactccttgaggtcgcgctgccatgcggcgatgccgctcatcagcgtgatcttcttgccaggtcggtccggcagtgtaatcggaccgccatcgtcattggtcagtcctgcgtccttgcgcgccttggcccggtcgtatgcctgcttggccgccgaccacgtgtatgcgtctgcggtggcgctgcggaagtggctgcgcgcgtacacttcgaacggcaggtactggtatccgaccgacacggactccgctgcctcggacagcacctcgttgaaccgctgcccgccgaaatactccacctcggcgtgatgctcactggtgacggtggtcttgttgaggaattcgccgctgttcaacgtcgcattgtcggccgggaaggcgccaccatcgacgcgggtcttgatgccggatttgttgtggcagacataatccacgaaacggaatgccgcttcaggcttgcgtgtggtgtgcagcacgcccagcgcggagccgccgttctcggcattggtgaccgtgccgtcctgagtcggcatgcgcgtgacgcgccacagtcccgatgtgcccggcacgtcggccagcagcagcgacggcatccaggctccggcgaacacggaggcgaccgacccgccacccagcgcacgtttccaatcctcggaccagactttgagatgggtgttgaccagtccctcgtcgatcatgcgctgccagaattcggtgaacgtcctggttccggcgtcgcccttgagatcgacggtcacggtcttgccgtcggatgacgtatggaaaggccgaccgcccgcgagccatatcatcgcattgtagaagctggcgtcaccggcgtctgcggcgatgtacacgccgatgtttttcagctttctcgcggcctcgtaataatcatcccatgtggtgatcttggtcgcgtcgacaccggcctggcggaatgcgtcatcgttgtagaagaacgccataggcccggaatccatgggtagcgcgtacgtgcgctgcgcgagctgcaccgacgcccaggtgcctggggtgaagaacgagctgtagctgccgacacgaccggtgaggtccatcagctggccgctcaccgcgtactgcggcagggcatagtattcgagctgcaccacgtcgggcgtgccgtacccgtcctgtatagcgctgttgaggtggtcgtagccgctgatgttgttcagcttcacgcggacgtctggattagccttctcgaaatcggcgatcagcgtcgtcatgctgggttcccacgaccagacggtgatgacggtgcgcgtgtccggctgcccgcaggaggcgaccgccagcgtcatcgcacagatcgtgagcaacgccgagatacgcaggcgcagccgccgcaaccgtgccgatatcgtcatgtcatctccttagcgtgctcgatgtatcgggaagaattcgctcatcgtagagtctacacgcgcgctgcaacaggtgaagatgcgtgaaggggatgaccgaaggtcaccgtattccggtcattaccacgccagattgtttgaccgcgaaggttacttgacgatgtagccctgatccttcgcgtagtccttcagagcctgttcccaaagcggcgacgccatcgctcagcttctggttgccggtgtaggacttgccaaggtagtcgccgaagataccgcgggccttgaccttcgggtcgccagtcaggttaatggtgaccgtctcgccttcggtggagaacagcgtcgcactggccagccaggtcatcgagtcgtagaagccggcgacaccggtgtcggacgtgatgtagtagttgtcgccaagggcgtgaatcttcttggcgtcctggtagaactcgtcccaggtcttgttgccctggccggtgttcaccaagttgacattgatgccggtctccttttttgaagtccttggccacctgagtcagcgtaggccctcaagcccacacggtgatttccttgacgtcgccttcctgcttcggagcggagctgctgcttgagttgccgcacgcagcgacgctgaccagcatcgccgcagcccggtaagcgccagcgccttctttcccataaggcgtatgtcgcgtgtcaccgcaaacatacgcctttcctaagcccttatagcccagtgtttccaacgattatcgtctgagcacgacaacacccgtcggatcgatggtggcccgcccgtcgtcgacatgcgcgagcgaagccgcgatggcctccccttcaacgtcgacggtcaccggttcatgggtgcggttgaacacgaactcgaagtggttcgccgccacggcgtcggcgcgttcgacacgcagcacgcggccatcaccggcgaggtccgacagccccatggaacccagcatcgccggcaggctcttcgcaagcccctgacggcccagacggcatccgacatatacggtccgcccgtcgccatacccgttggccacgatggccggcacctcgttcatgccggtccagcgttccgccttataggaggccagtaccgtggacgtgtcggccgtggacgtgatcacgtcggcgaagtcatgcgccaccgtgccattgtccaggtcgaggtgatccaatgcgcccggcatgtcgttgcccatcggggcgaactcttcgacgcgcacgccgacgacgtcacgaatcgagcccgggtagccgccaagccagatgtggtcgttctcgtcacccaatccggtgtagtatgtcacgaacaacttgccgccgttcgccacgaactcccgaaccctgcggctcgtctcttcggacagcaaatacacgcacggcagcacggcaatctcgtaggaatcccaatcggaccgcaccggaaccacgtcggcggtgatgccgttgtcggcaagcgcgcggaaccaatccaacggctcggtccaatgatcgacctgctgggtcgggttcgcggtgtactcggtggcccactgggactcgtagtcgaacacgacggcgaccttggacttgaccgtcttggtgcccatcagaccctcgtcggacagacgtcccagatcggcgcccagctcgcacacatcacggaagatctgcgaatcctcgcccgcatgcggcaccatcgaggagtgccacttctccgcgccggccttggactgtcgccactggaaatagcagatggcgtcggcgcccatggcgacctgcgcgagggagtcgcgcacgaccgagcccggctccgcacggtagttgatcggacgccaattcaccgcggaggtggaatgctccatctggaaccacggttccttgcgtgaaatgccgtccatcagcgacgcggcgtacgcaacctcgtcgaaatggtcctcgcccggcgtgaagtagtggtcgttggagacgaaatcgacctccgcaccccagtcgtcatagtcaagcatcgagccgccggcggacaccatgaaattggtggtcagcggcagacccggcgtgatggactccagcacgtcacgttcggcgatgtagagctccttgagcgcgtcggagctgaaccgcttgtagtcgagcagcttgcccgggttcatgaagttgccgtcaccgatgtagcgaggcgggatgatctcggagaaatcgttcatgtgctgggcccagaacgctgttccccaggcctcgttcaccgcgtcgatggtcttgtagcgcttcttgcaccacttctggaaggcgcgcatggcgtcgtccgagtagtcgaagcggttgtggcagccgtattcgttgctcacgtgccaggccaccacgtatgggttgcccttgtagtgctcggccatacgacggcacaggttcagcgcgtactcgcggaacacagggctcgtcgggcgccaatgctcacgggcacccggccacacggtgtcgccgcgctcgtccttccacagcacctccggatgggcctgggtcagccacatcggcggggaggcggtggcggaggcgaggtctacggcgatgcccgccttgccgagcttatcgatggcacggtccagccagtcgaaatcgtacttgccttcctccggctcgatcttcgcccatgagaagatgccgactgatacaaggttgacgccggccttcttcatcagacggatatcatcgtcccagacctcctccggccattggtcgggattgtaatcaccgccataccagagacgggattcagcgcccttcagcggctgcggccaactgtgctttctgcgtttactcatgttccgctccattacttgttcattgtctgacgccccggccgaaccgtcgcatcgacgaaaaatcaactgtgacatgcgagcgggctggtgccatatcgcgccagcccgcatcgcacacggtgagcgtccctccatatcatatacatgttccgtatggagagccagccgctaggcgcacgtcaagaccgtcagacgaacgtgacgcatgctgcaagcggacactgaccctcccgcgagatcactccttgacggcgccggcggcgaggccggactgccagtacttctgcaggcacaggaacgcgatgaccagcgggatgatcgtgatcagcgagcccgtgatgaccaggttctggatggcttggccgcccgcagtggacgcttggtccttccgctggttcagaccgatggtcagcgggaaccagtccgagtccttcaacatgatcagcggcagaaagcagtcgttccacgtgacaacgatcgtgaacagggccgccagcgcgatgcccggcaccgagatcgagccgatgatcaccgcggacacggccttgcggcccgggaagcggaacttcgccaaagcgtagccgcccatgatcgccagcagggtcgcgccgcccgcgcccaccaccacgtagatcagcgtgttgaccagccagcgcgcgaagatgccgtcgtcatgggtgaacaccgtcatgatgttgtcccacagcgcgaacgtcttgccaaagcccaggccgaacgcgcctgtgaagtccgattgggtcttcgtcgcgttgatgagcatggagacgaacgggaacaggcagcagaccgcgaagatcggcacgatgaacacgaacaccaacgcgaacggccacatgaacttccaaccacgccaatcccgcttgtgcttattcacacgagccaaaggcgacacactcaccgatgtcatgcccctctccttcgaaggactcgcagcgaagcacaccgcacagaacttgccacaacgcaacagctcattgaacttgttccgcgaaatgcaccctctctaaatgtttgcgttaccataatatcaatattgttggaattgtccacttgagggtacggcaagtcatcaggagatggtctatactgatggtaaccaaaacatagaaatgccaaaaaaacaagcaggaaccatggatcattcgcaacccgcttccatgcaggacgtggcgaaagccgccagcgtgtcgccccagacggtctcacgagtcgccaacggaagcaatgccgtccgaccggaaacacggcagcgtgtggaagccgccatggccaagctgggttaccggcccaactatgcggccagggcgcttaagcacggcaagttcaaggatgtcggcgtcgtgctgttcaacatgctcacctatggcaacgcgcgtatcctcggcggcatcgccgacgcggcgaacagcaatggttacgccatcacgatgcagtccttcggacgcaatcgggaacgcaccctgcatgccgccatcgagcgtatgaagcagcttcccgtggacggcgtcatcgccgtcatggaggagcacgtgacggacttctcggagttccgcccgcccaaggagctgccggtcgtcatcatctccgaggatcccgcgaactactgccccaccatcgatgccgaccagtacggctgctcagccgccgtcgtggactatctgctcagcaaggggcacaagaccgtctaccacatcgccgggccgtcctcatcgcgagccgcggaaagccgcgcgcaggggtggcacgacacgctcgaccaactggggctgcgcatccctccgacctatatgggcgactgggaggcggacagcggatatcaagccggactcgcgctggctcacgaccccgattgcaccgcgatctatgcggccaacgaccagatggcgtatggcgcgatgctcggattgcaggccgccggcaaacgcgtgccggaagacgtcagcatcgtcggagtggacgattcgctgagcgggacgattccacggctgtcgctgaccaccatgcgcatgaaattcaacgacatcggacgcgaggcgttcttcatgaccaagcgtctgtgcgagggccttcgagtgccttcgggcgtgaagaccgtggttcccgcggagctggtggaacgcgggtcggtgcgcgacctggaatcctagacgacgaatctcaagcgataatggcttcggcctcgccggtgtcgaacgggcgagaccgaggtcattatccgttcagcgtcggcgattcgtcagaggttcgccggctacataacgccttacgttctccaatgcgatacatccggtcgatgccttccgccgtgcgggtcgggtcacgacgcactcccagcgtgttcgcgcccatggccttgcatatgctggcgaaatgcgagccgatgtccccggtgccgaccaccagcaccgtggagccgcgcacgctcagcgcacggccgacatcgtgccatcgccgctccccttgttgacgggcatatatcgacattgtaggcgcacggaatattgccgcgacgccggtgataaaaatgacgatgcgccggcccgtcttttctaggagacgggccggcgcatcagacggccggagaaccgatgttaccggttggacttacgcttggcttcaagcgtcacgaccgcacccgctaccatcgcgagtgcagcgaagacaacgcccattgtggaggcgccggtctttgcgatcacgtcgccgggcttcttgccgtcgccgggcttgttgccttcaccaggcttgttgccttcaccgccgggggtcgtcggcttggtcttcagcgcgtcgatcgccgcagacagagccgcctcggcggcattgacatcatcctggctcaccttgtcatcgtcatagaccttgagcgctgcggcgagcttgtcatcaagcaccttgagcgactcgtccgtataggcggaacggtcgatcgcctgagccttggtgatcgtggcgtgcagcttgtccttgttgacttcggtcggaggcttctcgccacccttcttggtgaacgtcagctcatacgtgactggggacgtcacaccatccgggaagcggtatccgtcggcgggctcggcggtgaccgtgacggtcacgtcctcatcgcccacgttcactacggaactaggagccaacaccttgccgtcgaccttgtacacgactccctcgatgtcggggatggtgtatgtatcggcatcatcgtccactgtcggcttctgcggggtggcgaccttgtcctcctctacggccgtgggcagcaactcgacattcatttccgccgcggagccgaagttcgatccggaataatcggtcttgatgacaaacttgacgtaccgtccgttcttgggggtcagcttgatgcgctgcgtgtaggcgacgttcttcaacgtgcccgaggccacagaggctccaaaatcgttgggatcgtcggagacatacacctcgtaatccttggcggcaccgttattgttgccgtcgatacgggcgaggtagtcgaagtaggcgacgttctcacgcgattcgccgagatcgagagtcacccaatgcggggcggacgcggcggtcgggctgtactgggagtgccagttcgtcgacgagtcgccgtcgagcgccttcgccgcctctgcgccggagttctgcgacgactgggcgtgcacgctgatctcatcctgcgggacatacacgcgggaggccggtgcagtggcggaatcggccacgacccagccggcgtcgtccttgccgagtgccttcagcgcctgcttcagcgtcagcccggcggtcatgccgtcgaacctcgcggtggtggctttgtcgcttttgccgtatgtcgtcacggtgatgggctcgtccttggtgccgtagccgaagacggcgaagtccccggtcagctcggtgcccgccttgacgaagatcacggagcctggcgcgacggtcacatcgtgcagctgctcgatcgacgtcatgggcttgtccttcgtgaatccatctcccgcggtctgcgccgtcgggtcgatgtagtaggcgcgggcgccggtctgaatctcggattcggtgtggaacacctcaagacggctcagacgcaccggaccgcgggaggagttgaccaccagacggatggcatcgatgttctgggacgtgaagcgaaggtcgcgctgctgcccgaccgtcgtcatagtcgccagattcgtccatgttccattgactcgtccctgcagggtagcgctttcgatctgctggccggcattgcgcacgtcctcggagatcttcactgcatccacggcgacagcgctgcccagatcgatggtgtacgtcggcgtattgcccacggccttgtcggaggagagcttcgaaccgtcggtcagcttcggggccgctaccgcggtgccgttcgcggacgcggcgacggtcgcgctcttgcccagggcaagatcggtgccgtagcgtcgggcgagctcctcgcccagccccttaagtcccgcggcatccgcatcggcgagcttgccggtatcggacggtgggacgttcagcagatactgcgagttgcgtcccgtggactgctcgtagtacttcacgactttagctacggacgccggcgattggttggcatggtagaaccatccgggccggttcttggcgtcgacttcggccggataccagtgcagctggttggcggcgccgctgcggatctcggacagcacgctcgacatggtgccaagcgtaccgtcgggggccatctggccaggcttgagcgacaccttgtctacgccgtcgttgtatgccgcctgcgggctccactcggtctgacgggcccagccgtcctcgttgcccacccatcgggcatcgtatgcggcgttggcctgaattgcctgaggctgaagccggcggatcatctcgtagaacacgccatagtcgtaatgctcagtgcctgcggtgttgccttgggcaccgtcgaaccagacctcggagatgtcgccgtactcagtcagcagctcatagagctggttgagcatgtaggcgccgtaatccgtggccttgtacttgaacgtgggcagtttgccggaagccaccttgccggcgcggtcgtcgttctccaccagcgtggggatcgtgcgctcgacgcgtgcggagttgttgccccagacgcccttcttctccatgtaggaatcggccggcgaatagtagatgccgaccttcaggccgtacttcttcgccgaggcgacaatcttgcggaacaggtccttctcccccgtgcgcttggcgacggcggtgtttgcccagtcgtgctcggtgttgtaccgcgagtcgtacagctcgaagccgtcatggtgcttgaccgtcaccatgatcatcttgaagccaccgtcggcgaaggacttcgcccactggtcggtgtcgaggccggtcgggtcgatgcgggagggatcctcgttaccgtgaccccactcctggttgtagtacgtgttgatgccgtaatggaggaatccgatctgaccccagtcgatgtagtcggcctgcccttcggtcggacgcagcttggacagcttggtcttaagcgcggcctcgcactcggcgggcttcacgtcgaaggtattcgcctccttgatgcccgacgtgtcgcagctgacctgagagtagaccagcttgaattcgttggtggtaaagttcgcggaggttttggccaggcggatctcgctcagcgagccgacgaagccgcggctgagcgcggcggaatgcacttcgttgccgaagccgaccttgcccttgatgcccgaattcaggtaagccagaccggtgatgtccttggtctgggcgtcgccgccatccacgcgcatgacgagcttcgcgccggtgccggcctcattgggcacgtacgccaccgacacgacgtgctccgcacccgtggcggccgcggactcgatcttgtggtcggtccaattattgccggacttggtggaggcgccgaacacaagcttgttcgactcgtagcgcaggaacaggttgccgcccgcgccgaacagggtctggttgtcgccggtctgcgtcggggtgaagcgcagctccgcgaccagcggcgtggtgatggcctcgttgccaccgagggtgaagtccgtgggcgtgaaatcgaatccggccgtgccgccgcccagcgtgacggcggagttcgagatggatggattggccgagcgcgacaccagcgagcccagcatctgctcgccgctcgccgcggtatatgaggtgccgctgaacgtgccgttgaaatcgacatgcagtagctgggatgcgtcaagaatctcccacggggcgttcgaatcggcgacacgcgcgcggaacacgtcaccggcaagaccgcggctcgccgcgccggaagcggggttcacctcgtagccgatcccgaacttgttcccgacggaatcgctgacggccgcgagctcgccggccgcggaggtggcggtctcgccggccacgccatccaccttcaactgcaacgtcgaggcagcgccgtcggctcccggcagatatgtcagctggatgatgtgcttcacattgttggaaggcagcgtcacggacttcttgtagtcgttccatgtattgccggaagggttcgtggagaagccgtattcgaggttgctgccgttcgcccgcacgaagatgttgcccatggcggagaacaatgtggcgaggttgctgggcgtctgcttcgtacggtattccatttcggcgcggaatcccttgttcgccttcccgctcgcgctgaagctcgcggtcgaggtgaaggtcacgccgttggtgccgccagcgagggtgatgccgccgccgtcaagcttggtcggtatgctgccgtgcttggtcacggagcccttcgccacctcgtcgccacctgtggtgtaggtgtcttcagcgaacgtgccgccgaacgacacatcgaggtattccgtcggatccgccgccaccgcgacgttcggcaatgccacgaacgcgagcgccgagaccgctatcaatgcggtgagtctgcgcagccacgaacgcgagcatcctcttgatgctgtgtgtagcatatttcaatcctctatgattttgaacattcttgtacttcttgccggaatctttgccccggaggcacgacatcgttccgccaagtgttcagattcccgcagacagtctatcagatcaggctgatttaaggtaccctatgcaggagttcgacatatgacggtgccggagagcattggactctccggcaccggtcatgttcagcccctacggcgcttgatggtcagcagcaccgtcgcagcgctggcgagcgccatgaccgcgaccgatatcgcggtcacgttcacgccggtcgccgacagcggaggcttgggtttgtcgcaggtctcatacccatgatcgctggttctcgcatagtacgtcgcacacattatcatcacctcgtcaatcgcccggtaacgcaagcataccgcggaacaacaaaagtggtcccgccgttgaacggcaggaccacttcatgcattccacgcgcccgtgcgtcacgcagcgggcgcggtcggctcaccacggcgtcacgccttgacgacctccacacccagttcggcgccttccttcaccgcgaaggaggtggccagcgtctcatgggcgatcagatcgcggaaccgctcgacatcggccacattggcggacggcacggtcagcaccagggcgatgcgatcggcgatgtccaggtcggcggccttgcgggcgtcctgcacggcgcgaatcacgtcgcgggcgtagccctcggcctccaggtcggcggtcagcacggtatcgaggatcacgaaaccgccggtgggcagagcggccgacacggaagcgtcgacctcggcggcgttctcctcctccacgcggttgattagctcgtattcgccggcctccagcgcaacctcgccgttcggcgtctcgacgaccggagcaccggtcgcggcatcgacgtgccaggcaccggtcttggacgccttgatggcgaactggacctgcttgccgaggcgcgggccggcggcgcgggcgttgaccttcagctcgtgcacgatcttcagcccctgcgaaccggcatcctccatcgtgcagaactcaatatcctttatattaagctctgacttgagaatttcgtcgtacgccttgacggcgtccacatcctcgaccacgacggtgagcttggcgagcggctggcgcacacggatctgggcggccttgcgcaacgacagagtgccggagacgatctcgcgcaccttctccatcgcgtccaccagtgccgggtcgtcgaccagcacacggccaagctcggtcgcctcaccggtcttctcgtccgcgacgtacggccaatcggccagatgcacggattcaccgccggtcaggccacgccacacggattcggactccatcggagcgagcggcgcgagcacgcgcatgaacacctcaagcacggtgtacagcgtgttgaacgcgttcgcgtcctccttccagaagcggtcgcgggtgttgcggatgtaccagttggtgagcacgtcgatgaagtcacttgccgcatcgcacgcgtcagaaatcgcgaactcgtcgagcgacttctctacacgctctacgagcctgcgggtgcgggccagcaggtaacggtccatctcgggcagacccgccacctcgtccgcgcgcagctgacgggcgtcgaagccggccccgccattggccgcgttcgcatacagcgtgaagaagtagtaggagctccacaccggcagcatgacctggcgcacggtgtcgcggatgccctcagcggtaacaatgaggttgccgccgcgcaggattggtgacgacataaggaaccagcgcatggcgtcggaaccgtacttgtcgaacacgccgttcacgtccgggtagttgcgcaggtgcttcgacatcttctggccgtcggaaccgagcacgatgccgtggcagatcacgttcttgaacgccgggcggtcgaacagcgcggtggccatcacgtgcagcaggtagaaccagccgcgagtctggccgatgtattcgacaatgtaatcggccgggaagtgctgctcgaacttctccttgttctcgaacgggtagtggaactgcgcgaacgacatcgaaccggattcgaaccagcagtcgagcacgtcgctgatacggtgcatgtggctcttgccggtcgggtcgtccgggttgacgcgcgtgaggttgtcgatccacggacggtgcatgttgacgttgccgtccttgtcgcgcgggtagtcgccgaagtcggccttgagctcctccaacgaaccgtacacgtcgacgcgcgggtacttcgggtcatcgctcacccacaccgggatcggcgaaccccagaagcggttgcgggagatcgaccagtcgcgcgcgttggcgagccacttaccgaactggccgtccttgacattctcaggaatccagttgatctgctggttgagctccaacaggcgcggcttgatcttcgtcaccgacacgaaccaggagctcacaggcttgtagatcagcggcgtggcgcaacgccagcaatgcgggtaggagtgcacatagctcttctcctggaacaggatcgcgcgatgctcggccgggatctcggccagcgggccgtctccgttgcgcaggttgcgcaggatcggcttgttcgcgtcgaacacgtacataccctcgtaatcggggcactgcgcggtgaagcggcagccggcgtcgagcacgtcagtgctcttgatgccgtgcgcgttcagcgtgttcatatcgtcctcaccatagggagcctggtgaaccaggccggtaccctcgacggtgtctacgtagtccgcggtaaagatttggtagccttcgggccccggcacgttgccctcagactcggctttgtcgccagcgaagtacgggaacaccggccagtaacgccaaccggccatctcggagcccttgagctcgcgcacgacctcgtaatcctcgccgagctccttctcgtacttggagagcaggggcttgccgaagtagaacttcttgccggcgtacttgccctgcgtcgggcgcacctcgacatagtcaatgtcagcgccgacgacgatcgcgaagttggtgggcacggtccacggcgtggtggtccagaagaccgcgtaggcgtcctcctcgtcgcgcagcttcacggccaccgacacggtggtgtcctgacgatcctgatacacgtcggcgtccatgcgcagctcgtgcgccgaaagcggcgtctgatccttcgggcagtacggcagcacgcggtagccctggtacgccaggcccttctcgtacagctgcttgaacgcccacatcaccgactccatgtacgggatgttcagcgtcttgtacccgtgctcgaagtcgacccagcgggcctgacgatgcacgtaatcctgccattcgtgcgtgtacttcaggacggaggcgcggcaggcgtcattgaacttgtcgatgcccatcttctcgatctggtcgaccgagtcgatgccgagctccttctgcgcctccagctcggcgggcagaccgtgcgtgtcccagccgaacacgcggttgaccttgcggcccttcatggtctggtagcgcgggatcacgtccttcgcgtaaccggtcagcaggtggccgtagtgcggcaggccgttcgcgaatggcgggccgtcgaagaacacgaactcgttctgactatggtcgccggaagggttgcgttcaacggacttgttgaaggtgtcgtccttgtcccaatacttcaggacggtttcctccatgttggggaaactcgggttcggcgcgacgctggcggtctcgccgccctcgttcgccttgggatacacgtgggaattggtggtttcgctcaccattgctctcctcgatgtcgcattgcactggtcctacgggagctggctatagcgaaccattcacgggaagaacagggattgagacggccgttcgccacaccggcggcatatatgcgccggcgatgtcctcgcggccggaacccttgttccgcccggaacggccgtcatggccattcccgcctacgaggacgatgatcggcggcatgccctcaggctgccgaccgccaccgcggtaccacctcgcttgtcgctcgcatccggccatcctaagacggcgaaaactcgcgaccgcttgtgttcggctgtgacgggccgatcccgtcggttctactcagcttcgtgccgtcgacgttcgatcgaccgtcatgaagcttttcttccgaagactccccgctgataacggatcatcgccttgacttcggtgcatatcctatcacggtgtgtggccgacggaaccggagtggccgcgaacgccgtctgctcgcggccaggcaatcatgcgaggcccgaaatccgaccatcatgccggatgtacgccgacgctcaatcgcgcacgatgctgccgacgatccccgagacaatggacatgatgagagagccgagcaccgcccaccagaacccgtgcaccaacacgccaacaccgaacagactgattgccaaccatgaggcgagccgcatgaacagccagttgatgaccagatacagcagcccgaacgtgagaatcgaaaacggcagcgcgatcagctgcgtcaccggcttgatcgaggcgttgatcagcgccatgaacagcgcgaacactgcgattcccaaaatcggaggctgccccaccgcggtcatgccgggcagaagcaccaccatcaccgcggccgcaaccgtcagcaccagccatcgtatcagaaaatccttcatggcgtccatcttatgccatccaggccgtcaccgatcagttgcgatgtgccggttcggtgcattcatcatatgtcgggcacgatcatcgagaacgattgcacttaagggcacaatcgccgcctaaagacccagaccaccctcagtcggctccgccgacagctcccgccagcaggagccagcatgcaactccaatacgacgtcagggcggaaatcgtcgattacgttccgcggattcttcggctaccatgcaaacaggaggacgacgatgactacaaaggaaacggcggcggcgaccacgacgaagcaggcagccgcccggcaacgggcgttcgcgcaactggacgcgaccttccgctcaggagtcacccggccactgcgctggcgaaaggcgcaactcgacgcgatggcccgaatgctgaggcagaatgccaccgtcatcgcccgtgcggtacgcgccgacctgggcaaacccgccgcggagaccgcgctgatggaaatcgggctggtgctcgatgagattcgcttcatcaagccacgcctcggcaggtgggcggcgcggcatcccaagccgatgcattacctgctgcagcccgcagtcggctggacagtcgccgagccgaaaggcgtggcgctcatcatctcgccgtggaactatccggtgctgctcagtttcgagcctatggcggacgcgatcgccgcaggcaattgcgtgtgcatgaaaccatcggagctgtctccgcacaccagcggcgtgatggcggacctcatcgcacggtacatggacccgcaggcgttccgcatggttcagggaggaccgcaggagacgacaaagctgctggagcagccgttcaatcacatcttctacaccggcggaggaaaagtcggttcaatagtcatggccgccgccgcgaagcatctcacaccggtcactttggagctcggaggcaagtcgccggtgttcgtcgaccgtaccgcgaacctcgacgtcgccgcgcggcgcattgcctgggggcggttcatcaacgccgggcagacctgcgtggcacccgactatgtgctcacaacgtccgacgtcatcgagccgctggcaggaaagatcgccgaggccgtcacgcggttcttcggctcagacccgcaacattccgacagtttcggacgcatcatcaacgcccggcatttcgaccggctgactgcgctgctgcccgatccgaagagccccgccaccggacgcacggtatgcggtggcaataccagacgcgatgacctctacatcgcaccgaccgtgctattgggcgtcaaacccgatgcgccggtgatgcaggaggagatattcggcccgattctgcccattttggaagtcgccgacgcgaaggccgcagtggaattcatcaacgcccggccacgcccgctggtggcctacgcgttcacgggcagcaagagggtacggcggatgttcgagcgcgaagtcagttgcggagcgctgggattcaacctgccgcttggccatctgatctccagtcggctgccgttcggcggcgtgggagcttcgggcatgggctcatatcacggcaaggccgggttcctggagttcagtcatgtcaagaccgtggtcggcaagcccgcggtgccggatacgctttcgctggtgtatccgccgtatgacggcttgaagaagatactgatttcggcggtcagtcatacgccgagagtgcggtagcgggacacggcgcacctcccgctggcgggaggtgacgcgcagcgccagcgggtggtgaccacccccagtcggctcagccggcagcccccgccagcggggggcgttacagtattccagtcggctccgccgacagcccttcgggccctgcaattatggacgggctaggcatgactgttccgctggctcattgtcgttcgctcttcgcctacaaatagcaccgctgtttgcttgacggctcagcccgtcaacgggggcataatgtaaaagcccctcgcgatgaggggctttatcgatgagtaggacttgttacttggcttcgttggtggtgagcatggccttggtgacctgttggtagagatcctcgtagccgccgggcgtggaggcgggcagcacgacggtcttggtgttgttcgactcggacagcgagcgcatcacatcaaggtactggttgaacagcacgacgttgttgacgtcgttgatgtccatgcccacggcctgcaggctcttgatctggtcgacgatgccgtttgcgatctcacgacggtagttggcctggccctcaccctggagtcgggtcttctcggcgtccgcagcggcctgcgtctcgatctggatgcgctgcgcctcggcacgctggcgggtggcctccttctcacgctgcgcggcgttgatggagtccatcgcgctcttgacctgcgggctcgggtcaatggcggtgatcagcgtcttgacgacggtgaagccgaagcgcgccatctcggcgccgaccgtcttctgcacgtcgaaggcgacgtcgtccttgcgggcgaaggcgtcatcgaggctgagcgccgggatcgcggaacgcagcgcgtcctccatgtagcttctgagctgtccggcgggatcgcgcagctcatagtatgcggtggcgacgttctcaggattgacacggaactgcgtcgaagcgacgaccgtgacgaacacgttgtcgagcgtcttggtttccagctgcacgttcagctgggagactcgcatgttcgtcttcgtcgagatgcggtcgacgaacgggatcttggcgtggatgccggcgaactggaccttattgtatttgccgaaccgttcgatgatgtatgcctgctgttgcggcacgatgaaaatcgaggcgcacagcacggcgaggacgatgacgacgatgacgcccaacatgatcagagcacccgtcattcccaccagaacacccatcattcctccttgcctggtgttgccacaccctacttcgggcgcgatgtctattccatcctatccgaaaacgacgggctttcagtgaaagctcacataaaattcaagagttgttcgccgtgtggcccttcttcgtctcaccgtacgggacggcggcatgcccgcgtctactccccgtatgcgccggctatggcccggtcaaggtcggccatcaggtctcccgcgtcctcaagaccgatggacagacgaatcagatcgtcgctcacaccggcggccttgcgatacgattccggcacctcgcggtgagtgatgttcgcggggtcgacgatcagcgaccttgcgtcgccgatatttggcacgtatgagaacagcttcacgccgtcgaggatgcgacgcacacggtccgcgccgccttccaccttgaacgagaggatctggccgacgcctcgggggaagtatttcccggcgagcgcatgatacggcgagtccggcaaccctgaataattcaccgacacgacatgcggcgtgtgttcgaggtgcccggcgatggccgtcgccgtttcgacctggcgggcgacccgctgcggcagcgtctccagtccgatcagctgcaggtatgcgttgaacgggctttgcacggcaccgaacgtgcgcaggtatttgacgcggatgcgcctgatgaacgcttcggagccaaacgccccggagaagctgcgccggttgccgtcgatgtcggcgatgacctgctcaggccgcgtgaattgcaggaaacggccgttcgcccagtcgaaccgtccggcgtcgacgatcacgccgccgatggcgttgccatgcccggtgatgcccttggtggtcgaatgcacaacgatgtcggcgccgaattcgatcgggcgcagcaggtacggcgtcggcacggtgttgtcgagaatcagcgccagtccgtgccggtgcgccagatcggccagcggacggatatcggtgatggcggtgttcgggttggcgaccgtctcggcgaagatggcacgggtcgcgggaccgatcagagactcgatctcatgcaggtcgttgatgtccttgacgaaatcagcgtggatgccgaactgcggcaggaagtcgccgagcgcatcgactgacgccccatacaggttcgtcggcgcgatgatgcggccaccgccctcccccgcgcacatcagcgcgtatgacaccgcagccatgcccgacgacaccgccaccgcgccgacgccaccctccagggcggcgagccggcgttcgagcgcatcgacggtcggattggcgactctggaatactcgaacccggatatctcaccggcggccagatcacggccacgagcggcgttctccaaatcgaaggcggcggaggcgtagatgggcacgctgaccgcatcgtcgttgcggttcgcattatacccgccatgaaccgcaagcgtgctgaaatcagtcatttccaaatccctttcatccgcatgaccgccaaaacaacgaacaccgaccgccatattccttcaagacacgacagtgcgggcgtcatcgccatgaacgtcaacgcccgcacggcccgcaccgcatgataggcacggtacgcgaccctatgcggccacttccgtcgtcagccggtcgagcacctgaccgcttacgccgtcgatgcccagcgcctcgaacgccttgtcgaagccctgccccaaatcctcgatcaggtcggacacgtcctcgatgcccaccgacagacgcaccagctcgtcggtgatgcccaccttgagacgctcctcgcgaggcagctcgaaatgcgtcatgcggcatggcagctcggcgaggctttccaccgcgcccagactgacggcgagatggaacacgtgcaggttgtcgagcacgatggacgggtcgacccccggcaccacttcgaaggacagcacgccgccgaaccccttgagtccattctcggcgagcagacggttgcggtcgccatacacgcccgggtaatgcacggcccgaacgagcggatgcgccagcaggtattccgccacggcctgcgcgttgcgctgctgacactccatgcgcagcgccaacgtctggatgccacggcgcacgtcgttgcattcggtcggggcgagcacgccgccgaaccggttctgcgcgaagtagatgccattgccgacctcatcgtccaacaccaccacaaggccggcgttcacctcggaatggcctgccaggtatttggtggccgaatggatgacgatatccgcgcccaaatcgagcggctgctgcaggtacggggtgacgaacgtgttgtcgacgatggacagcgcgccgtatcggtgcgcgatggccgagatgcggttgacgttgttgatctgcagcagcgggttggtcagcgtctcgaaatatacggcgctggccgcgcggccgcctctgtcgcgcccgctgatcgcggcgtcgagcgcctcgtagtcggcggtgtcgacgctgtcgaactccagcccgcgctcggcgaagtactcgttgaacagcgaatacgtgccgccgtagatgttcttgccgaccacgatgcggtccccgggtttgaagatggacagcaccgcgtgaatcgcggcgagtccggacgcgaacgcgaagccgcgagtcccgtgctccagctgggcgatctgcttttccagaaagtcgcgggtcgggttgccgctgcgcgcataatcccagcggggcatggcgttgaccgattcgacagcgtatgtggatgagttgtagatgggcgggttgacggctccggtgttgttgtcgttgaccggcaatccgtggaccagctgagtgttgaacctcgtcatgagcaccccctgcggttttttcttggcgagtttcccgatgaaccccgcgtgacccttatgaaggtagtcagcggccggcagcctcgcaacccggacggcatacacattatttataggatgctcaaaacccttgcagacactggattttcacgacttgcacggcatctttgacgaccggcaagagccatttgcgacacgcacggaatattctggcggcaaccaaggcgcgactaagggcgacatggcttcgcgcagaaaccaacgccacgacccatcggccatcgtgatgttcgtcacatccgggccctgtagggcatttggtctcaccccggcagcggaatcgggcgatatgctggagtgacgccggcgggatccacgcgccggagggacccaagcaaaggagctcgcccatgaccaccgtagccatcgtcggatgcactcacgcgggaacgttcgccgccacatccatcctcaagcagcatcccgactggacgatccacgtattcgaacgcaacgactcgctgtcgttcctttcctgcggcatcgcgctgtgggtcggcgaccacgtgtccgatccgaagcgcatgttctattcgtcgccgaaggccctcgccgaagccggcgccacgatgcacatgcgccacgacgtgctcgatgtggatgtcgccggcaaggtgttgcgcgcccgtgacatgaacaccggggaagtcggcgaataccgatacgacaagctggtgatcaccaccggttccgcgcccgtggtgccgccgatcgacgggctggacgaggcgctcgaatcgggacgcgtgctgctgtgcaagaactgggaccatgcgatggcgatcaaggagcgtgcgggcagcgcgaaatcggccgtcgtgatcggcgcggggtacatcggcgcggagatcgccgagcagttcagcgaaatcggcgtgaagaccacgctggtggatgcgctggaccgcgtgctggcgaacaatttcgacgcgaccatcaccgatgacgtggagcaggcgttcgacgagcatggcgtgaccctggcgctcggccagaaggtgacggcgttccggccggcggccggcagcgacgggatcgagggctccggcgtgaccgtggtcaccgagaagggcgagtacacggccgatgtggcgatcctgggcgccggattccgcccgaacaccgcgttgttcgcggatcagctgcgtatgctgaagaacggggcgatcgtcatcgacgactacatgcgcgcctcattgccggacaacacggtgctcgacgacgtgttcgcggcgggcgacagcgccacggtccgatacaacccgaccggcgcggacgattacatcccgctcgccaccaatgcggtgcggcaggggctgctcatcggcgagaacatcgtcgccgcgacgaagcggtatcccggcacgcaggccaccagcgcagtgcagttgtacgatctggcgatgtccgccacgggactcaccgccggcggcgcgaaacgccgaggcatcgccgcgaaatcgacgacgatcacgcaggattaccgccccgatttcatgctcaccaccacgccggtgacgaccacgctggtgtggagcccggtcacccggcgcatcctgggtgcgcagttcctgtcgaagcatgacatctcgcaggcggcgaacgtcgtgtccgtggccattcaggcggggttcacgatcgatcagctcgccggcgccgacctgttcttccagccgaacttcagccagccgatcaatttcgtcggagccgtggccattcaggcagtggccgaaagctgaccccaatcgttgactcgcgctcaacgcggatgcgaaagccccgatcattgggaaacggccattccggttctcgtatccgcggctaatgcgagcgcacgattcgcatcagccgcgtgacctgttcggcggtgcgggccacgttcgcacgggcgtcgcgcagcagctcatcgagactcgcggcacccggcgcggcaccgaagaccgcatcgatgccgcgcccgtgcagacactcgatgccgtcgccgacgtggccggcgatagcaatcaccggtttgccgtgccgcttcgccacggaggcgaccccgaccggcgtcttgccgaacatggtctgcgcgtcaatcgaaccttcgccggtgaacacgatgtccgcccattgcgcggcggcatccagcccggactgctcgatcaccaagtcgatacccgggcgaaaatcggcgtgcagcacggcgagcagcgccatgccgatgccgcccgccgccccggctccgggatgatcggcgatgggcgtgcgggtacggtggtcaggacgggaacggtggccaggagacgatgattcagccacggccgcttcgacttttccgccatcgccattccgttcggcgggcacctgttcagcgagcgcacgttcgatgaccgacgagacgtgccgcagggcgccgtccaacagcgtcacgtcttcgcgactcgcgcccttctgcgggccgaacaccgcgctggcgccctcggggccggtcagcggattggtcacatcgcaggcggcgatgacatgcacgtcgccaagccgtctgtccaggccgctcaggtcaacgcgctccacttcggcgagcgccgccccgcccggccgcacgtcacgcccgtcatggtcaagcagccgcacccccaacgcctgcaggagaccgcagcccgcgtcgttggtggcgctgccgccgagcccgacgatgatcgtctcggcgccggcgtcgagcgcggcccgtatcagttcgcccgtgccgtatgacgtcgtggccttcgggtcgcgttcggatgggcgcagcagcgccagtccgctggcggcggcggtctccacgaccgcggtgcggccgtcgccgagcagcgcgaacccggcctgcaccgggcgtccgaggggatcgtgcgcgccggccgtcagcatcgtgccgccggtggcgtcggccagcgcccgcgcggttccctctcccccgtcagccatgggcaggcatcgtatttcggcgtcggggtcaccgcggcggatgccttcggccagggcccgtgccgcctcggcggcggtcaggctctccttgaaggaatcaggcgcacataggtatcgcatcgccggatcacacctgctattcggtgcgcagcgcggtggccgggtcctgcttggcggccttgcgcgacggaatcaggccgccgataagggtgagcaccatgctgagcaccaccaggatcaccgctccggccaccggcagcgcggcgttcacgtcgttggtgccgatgaaatggtgcagcacctggttgcccggtatgagcagcagcagcgtcacgcctatgccgatcaggccggcgcacaggccgatgagtccggtctccgcgttgaacacctgcgacacattgcgcttcgaggcgcccatcgcgcgcaggatgccgatctccttggtgcgttccagcaccgagatgtacgtgatgatgccgatcatgatcgacgacaccaccagcgacacggacacgaacgcgatcagcacataggagatcacgttgatgatcgtcgtcaccgagctcatcatcaggccgacgtaatcggtgtagacgatcttgtcggccttgggcacggtcttgttgtagtcggtgatggccttggacacgtggtccttgtcctcgaagctgtcggtgtagatgttgatcgtcgagggcgcgtcccggctcaccacgccgaacgcggcgaggttgtcgtcatacgtgccggtcgagacgtactggtcgtagatcttgaccagcacgtcctgcgaggcggtggcgatgtactggtcgaagctgtcggcgagccgctgctcgctcatcgccgccatccgctgcccgcccgcggctgactgcccggcctgcccgggctgagccgactgcgctgactgcgactgcatcacggccttggccatgttcgccttgtcgctcacgccgagcgaggccacataggtcttggcatcagcggccttcgccgcgtcgtccaacggcgagaacgccaggccgttgagcacgtcgcgggtcttgtccttctcctggtcggtgacgatggcgctggagttcgcatggtcgatcagctcgtcggtcagtgcgcgggtgtagccgattccgatggccagcggcgtggcggaggcgtccttgatcggcttgaccacgcccacgatcttcagctgctccgccgagtcgaagcgctctgcgatggcgtccgcgtcgtcgccgatgtacgtgtagtcgccgttcgcgtccttcacgtactggtctgcggcgggtatcatggccagcttctgccccatcgccgtcgcgtagtcgatcttgccggtgggtgtcttgaccgtctcgccgtcgttgagcttgttcatcatgtcggtgtagtcgctggccttgagcaggcccagctcatacagcgtggtgagcggtaccttgttgtcgtcgtcaagcacgagcacgacctggtccttgccggtcggccatgcgcccttgaccacgcggtagttgtcggtgatgaccttgctgatgagctgatcgtccttcgcccccggcatgatttcatggaacgagtcgggcgacgcgctcgtgtcggtcttgccggtcagcaccgtcatctgcatgctcgtcatgtcggacatgctcgacgactggcccatcgagctcatccgcgcagcgttcgatgtcgaatcggacttggcaccgatggtgacgccgttcgcggtgaccagcgtgccgtcgggatcgtggctgaacacggagaacttcacgtcgtacgtgtattggatgccggtttcgccgacatattggcgaacctcgctgttggggtcgtccagatacttcttgaaatcggcgaggttgttcttcgtgatgctgctcgtcaggctggaggtctgcttgatgctgcggtcgtccgggtagatgccatcgttcttcgccgatttgcctccggtctccttgccgcccgcctgggcgcccatgatgctggtcatgtcgaaggtctgcgagtcgatggtgatcggataggcggtcatcgtgtcgcgctggatgctgtcgatgtacgcgttgacgccggtggaaaccgacaggatcagggcgatgccgatgatgccgatagacccggcaaacgaggtgagcagcgtacggcccttcttggtcctcagattgttgaagctcagcgcgatggacgtggcgagcgacatcgaggccttgcccagcctcttgtgtacgggtgcctcggacgcgccctcctcgacctcgtacgggtcggaatcgctgcggatcacgccgtcgcgcagctggacggttctggtggcgtactgctcggcgagctcgggattatgtgtgaccatgaccaccagacggtccttcgccacctccttgagcaggttcatgatctgcacggacgtgtcggagtcgagcgctccggtcggctcgtcggccagcacgatgtccgggtcgttgaccagggcgcgggcgatggcgacgcgctgcatctgcccgccggacagctggttcggcttcttgttgatgtggtcgcccagcccgacctgttcgagggccttgcgggcacgctcccgccgttcggtacgggatacgccggagatcgtcagcgcgagctccacgttcgacagaatcgtctggtgcggaatcaggttgtagctttggaacacgaagccgatcgtgtggttgcggtacgaatcccagtcacggtccttgtaccgtttggtggagaccccgttgatgatcaggtcgccgctgtcgtaccggtccaggccgccgatgatgttgagcagcgtggtcttgccggaacccgacgggcccaatatcgccacgaattcgctgtcgcgcaggttcaggctgacgtcatccaacgccttctgcacaaaatcgccggtcttgtattgcttggaaatcgacttgatctgcagcacgatgctccccttattacccatgggtggttcgtcgtatgtctccatgatttgcggtatgacaccactgtatccgacccgttcccccagcgcctcgtgattcaccgcaagcatggggaataaaaccgacgacaaacgactttgcgtcgctttgacatgacggaaccgtgacggccctcgcgcgtcaagtgtgtgtatcaagcatgctttgcgtttttttagcgcccccctcagcagttttcccatacagtcgaaaccatgacaggactcactacatctgaagtcgaagaacgccgcgcgcgaggcgagggcgaaaccggggcgcgaagcgtcaccaaatcgacaggcgcgatactgcgcgagaacatctgcacgctgttcaacgcactgaacttcgctatagcgatactgctgttcgcggtcggcgcgtactccaacatgctgttcatcgcgatcatcatcctcaacatcgtcatcggcatcgtgcaggaattcaaggcgaagaaactcgtcgacgagctgacgatcctcaaccagccgcacgcggtggtgctgcgcgacggcaaggagacgaccatcgaggccggcgacatcgtcaaggacgatgtcatggtgctggattccggcaagcagatctgcaacgacgccgtggtcatcgacggccgtctggaagtcaacgaatcgctgctgaccggcgaaagcgactccatcgacaagaccgccggcagcgagctgtattccggcagctcggtgatttccggccgcgcgtacgcccgtgtgacgcacgtcggcgacgagaactacacgaattcgctgatcaacgaggtgcgccaggagaagcgcgtgcactccgagctgctggattcgatgcgcaaggtcacccggttcaccagcttcctgatcatcccgctgggcgtgctgctgttcgtcgaggcgatgttcctgcggcactccggcacgtacgacgccgtggtgtcgtccgccgcggcgctgctcggcatgctgccgaagggactggtgctgctgatctccgtgtcgctggccaccggcgtgatccgcctcgcgaaggccaagatcctcgtgcagaacatctattcgctggagacgctggcgcatgtggacgtgctgtgcctcgacaagaccggcacgctgacggacggcaacatgagcgtggaccggatcgtgccgctcggcgagcgcggtgccgccgaggattccgacgcgctgctgcgcgcctacctggacgccagcgaggacaacaacgtgaccatcgcggcgctgcgcgcccatttcggtgccgacgactccaccgccgatgccgggcagcccgcggcgcccgccggtgacggccgtttcgccgcgcaggccatcatcccgttctcatcgaagcgcaaatggggcgccatcacgatgcgcgcagcggctggcgcggcagacgcgcctcgccacgcgcaggagggcgagtcggccgcgacggcgaccggaaccgtgttcctgggcgccccggagcgcatccttggcgcgaacctgcccgatgaggcggccgcgctgatgggtcagggactgcgtctgatcgccgtcggatacctgcccggcgcgtggacggacgaggagcgtctgccggatgcgctgcagccgatgttcctgatcgcgctgcgcgacaacatccgcccgcgggccaaggagacgctggcgtacttccgcgaccagggcgtcgacgtgaaggtcatctccggcgaccatcccgacaccgtcgccgccgtcgcccggcaggccggcctggagcgttggcgtgacgtcatcgacatgacctcggtgccggcggacgccccggattccacgttcaacgacgtcgccggccgatacacggtgttctctcgcgtcacccccaagcagaagcgccagctggtgcaggcgatgcagcgggccgggcatcaggtcgcgatgaccggcgacggcgtgaatgacctgctcgccctgcgcgaggccgactgctcgatcgccatcgcctccgggtcggacgccgcgcgccagatctcgcaggtcgtgctgctcgactccgatttcacctacctgccgcaggtggtgctggagggccgcaaggtcgtcaacaacgtgacccgcacggccgccgtgttcttcatcaagacgatctactcggtgctggtgtcgttcttctgcctggctttgaacgtcccgttcccgttcattccgatccagatcacacttgtcgacgcctgcatcgaggcgtggccgtcgttcctgacgatattcgaatcggacacgcgacgcatccgcggccggttcctgcccactgcgctcggcaaggcggcgccgttcgcgatcgccgtcaccggcatgatcatcgcattcagcctcatcgctccgttcggcgagacgcagaaccgcacggtcatgttcgcgctgctgatcgccgcgtcgatggtcgccgtgatcaagagctgcgtgccgttcacgaagatccgcgtgttcgtctgcgtgacgatggtgctgggcgccccgttcgcgctgctcatcctgccgcacctgttcgaggtggtcgcgatgaccggcccgatgtgggcatggttcgcggtggcgttcgtggtgatgatggccgtcaccgccgcgatcatcgcggcgcagcgggcatggctgcggtcacggcgctgaccggcgagcgattccccgtgatgccggccggcgtccggcccggagcgattcggacattcatgttcgatgcgttccgggccgggcacatgtgttttccctgactgcgcggtcacggcagagagctgttacagtgaagccatgcagatgatacgacacgccgatatgagcgatctggatgcgctggcagcgctcgaatccgaatgctttccgccggcggaggcggcgagccgcgacgccatcgccgaccggttgcgcacatacgccgaccatttctggctgctgttcgacgacgaccggctgacggcggccatcaacggcatggtcaccgacgagccggatctggtcgatgccatgtatgcggacacgtccatgcatgacgagcgcggcgcgtggcagatgctgttcagcgtgtgcaccgaccccgggagccgacgggagaggcgggcgagccgcctcatgcgctccgtcatcgaagacgcgcgcgatgccgggcgagacggcctggtgctgacgtgcaaggaacccctgatcggcttctatgagcgtttcgggtaccgggacgagggcgtctgcggttcccgtcacggcggcgcggcttggcatcagatgcgtctggactttcggcgggagcggcagcagtcgtgttgtccacagggacgatagacagtatgcggtttcattgtttttccgtgaatccccgcaggagctgtgtcgccgaacggccgcagcggcggtctggcagcagcagccgagatcggccgccccccccccgagtctcgcgaggtatgcatgcaatcgaacatatccgataccgccgtagcgcagtcgaattccatgtcgaagcgtgatctggtcccgatcatcgtgatgatggtcggcagcttcaccgccatcctcaatcagacgctgatgacctcggcgctgccccatctgatgcacgatttcgacatcaccagcaacactgcgcaatggctgagcaccgtgttcatgctgacgaacggtaccatgatccccatcagcgcgttcctcgtccagaagttcaccacacggcagctgttcttctacgcggtcggcatgttcctgttcggcacgctcgtgtgcacggcggcgcccggtttcggcgtcctgcgctgcgcctcgatggcggcgcgacggtcctcaagcagtgcgacgatgtcgtcgatatgctccggttcgtcggcctcgaacgcgaagaaccgcttgaggtcctcgatggacatgcccgcgtgcttgaaacagcagatcgtcctcatgcggttgatatgacactggaggtatatgcgctgcccggccggcgtccggccaacgttggtgagcagccccgcatcctcgtaataccgcagcgtcgacggctccatatggaacatgtcggcgacctcgcggattgtgtatcgttccatgctcgacattgtagccgcgaggatgacacgccggacgcccttgcgctcaagccaacttgaagcgtgacaatggagacatcggaccgatcgacgacacctggaggcacccatgttcgaacccaccggcacctacgcgcccgccacgacgcgctacgacaccatgctgtacaagcgctgcggcgccagcggcctgaagctcccggccatatcgctgggcttctggcacaacttcggcgacatcacgccctacgaccagatgaaggccctggtgctcaccgcattcgaccacggcatcacgcacttcgacctggccaacaactacggccccgaacccggcgccgcggagaagaacgcgggacggctgatccggcaatacctcgccgcccaccgcgacgaactggtcatcagcaccaaggccggctacgagatgtggtcgggcccgtacggcgattggggcagccgcaaatacctgctcgcctcactcgaccagagcctggaacgcctgggactcgactacgtcgacatcttctaccatcaccgtccggaccccgagactcctttggaggaaacgatgggcgcgctcgcccaggccgtcgccagcggcaaggcgctctatgtgggcctgtcgaactacgacgggccacagctggagcgggcggcgacgatcctcgatgaactgcacgtgccgttcatcatcaaccagaacaaatacaacatcttcgaccgcaccgtcgagcgcaacgggctcaaggacaccgccaagcacctgggcaagggtctcatcacgttctgcccgctcgcgcagggtctgctgaccgaccggtatctcaacggcatccccgcggattcgcgcgtggcgcacgatccgcgcttcctgcacgccgacgacgtgacgcgcgtccacggccagatcatggccctgaacgagatcgccaagcagcgcgggcagacgctcgccgagatgtcgctcgcctggctgctgcacgacgacgccgtgaccagcgtgctcgccggcgcatccaagccgcagcaaatcatcgacaacatcggggcgctgaagaacacggacttcagcgacgaggagctgaaagccatcgacgagatctccatgcagtgacgaataccgctggaagtcgcatccggaaacggctcccagcgtaccggaaggaaacgtaccggcatatattcatgccaatcacagcacagcttccaggatggtggagtgatatggaggttgtcggcaagagccggcgaggtcactcaaggtaaccccacaattgtccccctctctcttctccttctcacccggcccttttgggccgggtttccttttcttcggagcctgcgacaccggaaagccgacgacggcgaatcgtatcgcaatggtgatgtacagtagtgagttcgccacgaccattacgaggcggcttcatgccgccgggaggagacaccgatgctgcccgacgggacactgcccgacgattatgtcgtactggatctggaaaccaccggtgtcagctggtatcgggacaccatcatcgagttcggagcggtgaaggtcgtcgaccgcaagcccgtcgacacctatcagcagttggtcaatccgatgcgcaacctcaatccgttcatcacgcagctgaccggcatcacgccggacatgctcgaaccggcaccgacgctggacaccgtgctgcccgacttcctgcgctggtgcggcgacgacgcgatgatcgggcacaacatcatgcagttcgacatcaagttcatcgacctggcggcgcagcgcatcctgcaccatgcggtgccgaaccgcatcatcgatacgttgcagatgagccggagcatgtacccgcagtacaaccgacaccggctggtcgacctgatccagcgtttcgacatcgccgacgtcgaggagcaccgcgcgctgtcggacgccgagcagacacagatgtgcttcgaatacatgcgcgacgagcagcgtcgcagagactgctgagagcggagcgagctgactgatggcattgggcgttggcgcgcggtctctgacgccgcccgccaacgctcaatgccatcggcgcagttttccgcttccgtcagcgttgattcagggggatgtaggcgcgctccacctcgccggtgtacacctgacgcggacgaccgatcttcgtgttcgggtcggcgagcatctcgcggtactgggcgatccatccggggatgcggccaagcgcgaacagcgtggtgaacatcgccggatcgaaaccgatcgcgcggtatatcaggccggtgtagaagtcgacattcggatacaagtgacgtgacacgaaatactcgtcgttgagcgcgatgtcctcaagctcgaccgcgacgtcgaacagggcgcgctcgtcggcgggaagcttgcgggtgtcctcacgcgcgatgatcttctccagatacaggcgcgcgatcgcggcacgcggatcatacgacttgtacacgcgatgccccaggcctgagatgcgatgcccctcggccttcgcgtcctccacgaactggcggacggacttgccggagtcgcggatcgccttcaactgacgcaacacggcctcgttcgcgccgccatgcaacggcccggacagcgcgttgatgccggcggagatcgccgcatacaggttcgcgtgggcggagccggcgatgcggaccaccgacgtggagcaattctgctcatggtcggcatggatgatgagcagacggccgagcgcgtgcacgtacagcgggtcggaatcgaaccgctcgtatggcacggcgaagcacatgcgcaggaaatcgtcgacgtagccgcgggcgaggtccgggtagagcatcggctcatcgcggcggcgccggaaaatgtagctgaccaccgtgcgcgccttcgccatgatgatcttcgcggcctcatccagctggtcggagtcggtgatgtcggtggtgtcggggtagaacgccgcaagcgcgttcaccgccgcagcgagcacgctcatcggatgggcggcacgggggaacgagcccatgaacgtgcggaaatcctcgcccaccatggtcttgtggttgatgtcgctgcaaaaccggtcgtattccgcctgcgtcggcaggtcgccgtgtcgcagcagccacgcgacctcaaggaaatcggaatgctcgcacagctgctcgatggggtagccccggtagcgcaggatcgaccgattgccgtctatgaacgtgatcttcgattcgcactgcgccgtggtcaggaagccgggatcaagcgtgacccagccgtcgttgcgcagcttggagaccacaatgccatccgggccggccgaagccttgacgaccggcagcgtgtactgattcgaatccacatgaagttcagctgtcgccatgcacgctccttaatcccttgattgagtcgttcgaattgtcaagtcgtcgaaattatcgaattcgtcgtcccggtgccttgtattggacacactatattgcgtgcatgtttccaccaaaaacgccgctccagcacgtggacatcatcacatgccaaagcggcgacggcatcgcccgatacagaccgtgggcgatggacgaccggttgccggtcagtcgcgggtggtcaggatgaccggaccgttctcggtgatggcgatcgtgtgctcgctgtgggcgccacgcgacccgtcctcggaacgcagcgtccagccgtccttggggtcctggtagatctcgtcggtggtcttgaggaaccacggttcgatggcgatgaccagacccgggcgcaggcggtagccgtggccggccttgccgtcgttggcgacgtgcgggtcgccgtgcatgatgtggccgacgccatggccgccgaattccaagttgatcgggtagccgtacgaacgggcgatgtcgccgatggtggaggacacgtcgcccagacggttgcccggacgggccgcgtcaatgccggcggcgagcgcctcctcagtgcacttgatgagcttgaggtcgctcgggtcggggtcgttgccgaccacgaagctgatggcggagtcgccgacccagccgttgacgctgatggccagatcaaggctgacaaggtccccgtccttgaggttgtagtcgaacgggatgccatgcagcactgcgtcgttgaccgacgtgcagatgtagtgtgcgaacgggccggtgccgaagtccggcgcataatccacgtagcacgattcggcgcccttgcggtcgacgatcttcttgtgcacgtactcgtcgatctccagcaggttggtgccgaccttcgtcatggccttgagttccttgagaatctcgccgacgaaacgaccggccggcttcatctcctcgatttccttagcggttttcagttcgatcatgcaacccagcctactgtgcgggggttacttacgcctcggacggccgaacttgaacgcgcggaccatcgaggaaacacccatgacgatcagcgcacatccgcagaaaatcaccaggaacagcatcgacgagaccggcgagaccagtacgacgagaccggcgataatcgagatgatcgcgtacagcaccgcccagccggagctcggcaggcgccatgattcggcgagcgccatcacgccttccatcatccagccgaggccaaccaccatcgtgatgaacactgcgagcgcctgtccggacagggccgcgttcttcagcatgagtacgccgccgaccgacagcattatgccgatgaggatgtccaggatgcgccatccggccggcagtcccaatgtgacgatggcgctgacgatgcggatcacgccggagaccacgaagtagatgccgagtgcgacggccgcgacgccgagcgtcttgccgggccagatcagcagcgcgacgccgagcacgatcgccgcgacgccgatgatgccgtacaggccgcggatcgcgttcttcgccttctgcggcagcatctcctcgatcagccggaacgggctgaagtcctcccagccgccctgcccttgctgctggccgggctgctgttggccgaacggcggctggtaggcgtagggctggccgtacgggcggcctggctggtcggatgcggtgcctggctgcgtctggtattggccggatgcggtgccgtcctgcggcgctcccccgtacgggtattgctggcccgcaggctggccttgaggcgcgtaggctccgtattccggctctccggcacggccggcctgttcgttcccgccgggctgtccgccgtcaccgcgcccgctgtcgccatgtccgtcgctgtgcgggaaaggcccgccatcgtatgtgctcatcatgactccttcaccattcatgcggcctgccgtcaaccgtgtgcgggcatccgaagcgggccacttcgatatcgtcaccgtcaccaccatattctagacaagttgtctaattcatgccatcaacacaatccgccgttccgtccaataccttgcgtgtcgttcgctatgggaaaaaacgggccgcggaaggtcagaaggaacgtcaccgaacccggatagtatgagaccatgaccacagatttgacgtccggcctcgatacggccgctttttcctctgttatcaaaccatccgacgatctgttccgtttcgtcaacggcccttggatcgacacgtaccgactgcctgacgacaaggcgcgctacggttccttcgacaagctcgcggaagacgccgagagccagatccgcgacatcctggaggacgaggactgccccgcagccaagtcgcaggcgctgtaccgctcgttcatggacaccgacgccatcgaggcggccggtgccacgccgatcaggcccgccctcgacgccatcgaccacgccgccgacaaggcggcgctgacccgcaccatcggagccctcaagcccatcgacatggggccggacgtcttcgacatcgccgtattcggcgaccccaagaaccccgacacgaacgtcgtgcacctcgaacagtccggcatcggcctgcccgacgaagcctactaccgcgaggaccactacgccccgatccgcgaagcctacgtcgacatggtcgccaagcagctgcgtctggccggctacggcgatgaggagaccacccgcgcacaggcggaccgcttcctcgatgtcgagacccgcatcgccgcgaaccactgggacaacgtcgccacgcgcgactcgcagaagacctacaacccgaccgatttcgtcacgctgagcgacgaattggcccacttcaacatcgcggcgtgggccgacgcctggcagggcgcctacgacgccacgccggcggcgaagacccagccggtggacctgacggccgcgctgcagcacaccatcgtccacgagcccagcttcctcaagggcttcgacgccttctggaacaacgctgaccttgacgacctcaagctgtgggcccgcgtgcacgtcatcatcggcaccgcgagcctgctcagccacgactacgacgtcgccaacttcgacttctacggcaaagtgctgtccggcaccacccagcagcgcgaccgctggcgtcgcggtgtctccctggtcaacggcgtttgcggcgaggacgtcggccgcgaatacgtcaagcgtcacttccccgaaagctccaagcagcgtatggggcagctggtcgacaacctgatcgacgcctaccgcgtgtcgatcaccaacagcgactggctcggcgaggagaccaaggccaaggcgctggagaagctgtcgaagttcacgccgatgatcggctacaccgagcgttggcgcgactacaccgcgttcgacgttcatgccgacgccggcctggtggcgaacatgcaggccgcggcgctctacgagtggggcttccagctgtccaaggccggcaagccggtcgacaagggcgagtggctgatgaacccgcagaccgtgaacgcctactacgagccgagcatgaacgtcatcgtgttccctgcggccattctgcagcctcctttcttcaatccggatgccgaggacgccgcgaactacggcggcatcggcgcggtgatcggccacgagatcggccacggcttcgacgaccagggcgcacagtacgacggtgacggcgtgctcaacgactggtggacgaccgacgacaaggccaacttcgagaagcgcacaaaggcgctcatcgagcagtacaatgccttcgtgcctacgcaactggccgagaagtacgccgacgagccgaacaaggcgccgcacgtcaacggagcgctgaccatcggcgagaacatcggcgacctcggcggcgtgaacatcgcgctgaaggcctacgcgttcgcgctcgacgaggccgcgggacgcgacaaggacggctccgcgaaggctatcgaggagtcactgtccgcggccccggtgatggacggatggaccggcctgcagcgtttcttcctgagctacgcctcgatctggcgctcgaagaaccgtgacgagctcgccgagaaatacctgcagatcgacccgcactcccccgccgaatgccgcacgaacggcatcgtgcgcaacgtggacctgttctaccgtgcgtttgatgtgactcctgacagcgccatgtggctcgaccccgataagcgcgtacgcatctggtaatccgttgccggcaggcaggctgaaccgcgcctacctgccggcagatcatcagaattcggcttctcccgccggccgcatgtcctcggtcgtcgactcatcgagcggcgattcggcgaatcccgaaccgaactcctgcgcctgtgaggtctcctgcgtctgtgaggtctgcggattatcggtcggggtttcttcgcccagattatcgaacgtcaccggcgttggatgcaccgggtgcgcatccgtctgctgtcccgcgcccgccgttgccgtgccgccgcccggcgatggcggcaggccgggattcgccggcgtgccgttcccctgcgccggggcgtcacgatccgatttctggaacttcttcagttccgacaccccgtaattgatgtcgtggccgatattggtggcctccacaacgatgcgggagcgcctctcatcgttctgggtcgtccattcctccgtgctgagcacaccggtcacgatcgccgcctcccccacgtgcaatgacatgcgagcgttggacgcgagcgtcctgaacgccttcacggtaatccatgtggtcggcaggttgcgccattcgccggttccgccatcccggtaccgccgcgtgctgcccatccgaaacgagcatccctcgactcccccgctgcgcccgaacggcaccggcatcgatccgacgaacccggtgatggtcaccgtcccctgttgtatggccatgtcggactcctttccttccctgtactgacgttggaccgccgatcccccttcggcggtgtactcactatcgcagatttcccgccggcatcacatggttttcggacaatgtggtcgaaggctacccctttggcgtgttgtggacagcatgtggatagaaaaccggttatccacaatcacgccgtcaatgcccggctcattcatgaccggctatgctgggttcggtatcgcagacgaacagcaaggagaattcatgggcaaaccgccatggatgcgacagacccgtgtcaccgccgacggggaaaccgaattccacgacaccggcttccccaccagtttcctgtccatattcatcggcctgagtatgccgaggaatccccgcaaagcgttctcgatgcaccgggccgtatggtggacggtcgcctggctggcactgttcgcggcgttcaccgccatacaggcatggtatacattccagacccgtgacagcgcgcggatgggggaatggtatctgcacatgttcggcatcaccctggcgggcgactggtggccgatcgcggttctgcccgtgctgtttggccccgggggcgtcgtgttatggatattgggcggcgtcttcaacaatcggccctggatcgtcgccatcgccaatgttctcgtcctgcaattcatcatcagcgcattgggcgcttccatcggacacttcgccatgtttctgacgttcggtccgcatgtgccgggactgaccgattcgaccaccggccgcgcagcagagcagctgtatgtctccagctcaccgcagacatggattcccggtctcatcaccgccggcatcgccctgacgcttgccgtaatcatggccgctgtcactggggcgagcagcgcaaggcagaacggcacggcgatgaatcgtctgcgcatcatcgcgtacgtcttatcctgcctgggattcgtcgcattgctcatagcaatctgcatagtgcttgcatttctgcgcaacaagcagaccaacatcctgctggcggtattggcgttcctgacgctgatcgcatggattcccggagaaatgaagtcgatacgccgctgcgtcgcggaacaacgtgatgcttcatggcagtgcgtcgcgggcagcttcctggcattggacctgatattcgtgccgatgctagccgccaccgccctcacctcatggtgacagacatgcgccagtcgggcccccatcctgcgaaagtcccatccgagcatgcgtaaacgggactttcgctgggtgaagaaggaataaaacgcagaagtggggggtctttcgcatgaaaaaccccccacttcgagcgatcaggagaagcagccggactacttgccgagcagcgtgtccagacgcgacgccagcgtctgcgcagcgtcggcgaccggcacggcggcggaatcggagccgtcgcggttgcggatctcgattgttccgtcattcacggtgtcacggccggcgactgcaatcagcggcacaccgatcagctcggcgtccttgaacttgacgcccggggagaccttcttgcggtcgtcgtagatgacctcgatgccgcgctcctccagttctgcgaccagcttctcggccgcgtcgaacgccgccgcatccttgccggtggcgacgacgtgcacctgggcgggcgcgatgacggtcggccatgccagaccacgctcatcatgatgcgtctcagcgatgcaggcgagcacgcgggagacaccgatgccgtagcagcccatccacacgggcacagtcttgccgttctggtcgagcaccttgaggtcaagcgccttggagtacttgaggccaagctggaacacctggccaatctccacgccgcgctcgaagctcagcgggccggaaccatccgggctcatgtcgccatgacgcacctcgaccgcctcgatggtgccgtcggccttgaaatcacggccgtacacggcgtggaagcggtgcttgcccgcctcgtcgccgccgatgatccactcagtgccctcagccacgtgcgcgtcgatgaagaagcgcaccggttcggcgacgcccgcggcctcgccctgcttgccgaagaccatcggccccatgtagccggccaccatctcgggatgggccttgagatcgtcctcggtggattcctccagctcggcgggcgcgaactgcgcctcaagacgcttcatatcgacctgacggtcaccgggcagcgccacggcgatgacctcgcgccacggcccctcatgatcatcgtcctcggggtgcagcacagtcacggccacggtcttcaacgtgtcggcggcagtccattcgcgaccgtcctcacgcgggtacagacggttggcggtggcgaccagatcctcgatggtcttggaatccggggtttcacggctttccatcgcgggcacggcggagctgtccacggccggcagctctggggtggtcagcgcctcgacgttccacgccttgccggagggcgccagcgcgaacgtgtcctcaccaatcgccatgggggccaggaactcctcggacgcggaaccacccatcgggccggacatcgcgaacacgggcacgtacttcaggtcgagacgctggaagatgcgctcgtaggcgccgcgctcgtcgtagtacgccttcttcatgccctcctcgtcgatggtgaacgagtaagcgtccttcatgatgaactcgcggccgcggatcaggcccgcgcgcgggcggaactcgtcgcggtacttggtctggatctggtagagcgtgaccggcaggtccttgtacgaggagtacatatccttgaccagcagcgtgaacatttcctcatgcgtgggggcgagcaggtagtcggcctcgtgacggtccttcagacggaacaggttctcaccgtattcctcccagcggtgggtggcctcatacggctcgcgcggcagcagcgccgggaagtggacctcctgggcgccgatgccgtcgatctcctcgcggacgatggcctcgatcttgttgaggaccttcagacccagcggcagccaggtccagataccgggagccgccttgcgcacatagccggcgcgcagcagcagtttcgccgaatcggtgtcggcgtcggcgggatcctcgcgcagcgtgcgcaggaacatggtggacattcgaagtgctttggaactcatgggttccaaggtattcgcgttcggggacattgcgggcccggttcagttcggcaaacccgcagtattgaaaaaggccacccacccggagctcaccgagcgagcggccttcgtattggcctcgcggccgtgccgcgcttatcgcgtcatccggcgcagccgttcgagggtaatgccggccgccagcatggccatcgccaggacggtcaccagcggcatatcgataccggtatgggccagagagtcggccgcggacgtcttgcctccccggcaactacgcccgtgttcgcgcccggcttggcggaagacgagccatcacccgacgtgccatccggcacagtaccgggcttgttctgctcattgccgcccggcgcggtgctgttcggtctgggctgcgtgacgatagcactgcgggcggttcatcagaaaggccgtcaaccgttgcgcgcatggtccctgtacgcctctttctctttgcccgtgtcgctgatgctgctgtgcgacctgctgatgctgccgagatacatgtccgaagccgtcagcgtggctgtcttcactatgctcgcgggagccgcctgtcttatcggcccgggcaatatgtcgccgagcgcatcatcgtcgccttcatcagcgctttgagccttaccgtcatcgcgatcgccgatttcagcaatcgcatggttgagaaaaacctcgtggcgattgccgcatatgtgctgctgccggcattggccgccaccgcatggctgcgtacatgccatccaatggccggcagcgcgacccgcaacctgcgctggatattcggtgccgccgcgcgctacgaggcaagcctcgaatcggtgcaatcgctcggaaaacgcatctcacagctgcgctagcgcaccgctacccggcgaaagtcccatcagcaccatctcaaatgggactttcgcgggattgatgtcttcctccgcccaatagcagtcccatatccgaaagcagccaccgctagaacagctcggcttgttcgaattcgccagcaggctcgtcctcgtgaggcgtttgcggccggaacgcagccacgccctcgtcgcccagccgcgcgctggcggcctgtgacccgccgcgcaaatcgccgtcgagcatcaccgcatccgccgaaaccgcgaacatgcgctcgttgacgccggcaagatacaatccgcccatgcgttccacacgcgagagcgccacatatcccatgccgggcgcgaacgtgcggctcagatccatcaccgcccggtcgagggtcatcccctgcgacttgtggatggtgatcgcccatgcgcatcgcaacggcacctgcgccacggacgccatcaccgtgtcgccgtccatcatctcccacgtggcctgcttcatcgtgacgatgttgccgttctcgaattcgacgatgggccagccgcccttgctctcgttggcgaagccgcgcacggtaccgagcgaaccgttgacatactggtggtcggcgtcgttgcgcagcgccatgacggcggcaccggtcttgagcacgaggcactccggcgccagcatgttgcgcttgagccgttcgaccagatgggccggccccatctgcttggcatggaactcgtgcggctccttgtctatccgcgcaagcctggaatcgttgaggttatcggcctgccggttgacggggaacaggtggaccgccacctcgcccggctgcggtgtcacaccgagccgcgtgacgagcgcgtcacggtcatcctgatccacgcatccggcacggatgtcggtgagcacgtgcagcagccggccgtcgtcctgacgatgctgctcggtcagatagcagatgaccggcgcgagttcgccccacaccagcgattcggtgacgaatccttccggattgagtccggccttcgcgtaccgttcgcgggacgccacgaaatccgggccgggcggcagcacgtcgcggtcgcgcccggacacggagaccggcggcagctggaagaagtcaccggacagcaccacttgcaatccaccgaacggccgcggatcatgccgcacttcacggcacacctgatcgaccatgtcgaacagccaggcgtgcatcatcgacacctcgtcgatgatgagcacgtcggctgcctgtatcttgcgccgacgacgggtcttgatggtcttcagcagattcggcgtcagcacgttggcgagtccgacgccgctccacgagtggatggtctggccgtcgatatgcgtggcggcgatgcccgttgacgcggtgacggccacgttcgcgccgtctgcgcgcgcctgccggatgaactcgttcagcacgtacgtctttcctgcgccgggcgcacccgtcaggaacacgttcgcgtcggcgttcagaatcgcgagcgcctcagactgccgcatatgccctccttaagctcatgcatcacgcacgatccgcgcgccctggcgtatgacatcgctcgcccgcgggctcagaccagccggcggaccacctgcagcacgccgtgctcggtgttggccggcgcgatgtaccgcgccgcgcgtttcagatccggatgcgcgttggccatggcgaacgaccatccgccggcgtcgagcatctgtaaatcgttgagatagtcgccgaacaccgccgtctgcgcggacgtgacgccgagatgccgctgcagcgcgacgacaccctgccgcttgtcggttccgggattcatgatatcgacccagtgcgctccggataccaccacctgatgggtgcgttccacatcgcccagcaggtccgcggccatgccctgcgcgtcgccgaaatcgaagatcgccagtttcagcacggtttcgccctcggtctccagcacctcgtgcaggtcgtccacgatgcgcagcgccttgtagtatttggagcattcctcgacgaacggcctgtcctgccgctggatgtacgccgtgttcagaccgcatatcacgagtccgatgtcatgcgagcccgacgccaccgcggcgtccaccagatcgatcagcgtacgcgtgatgtcccagctcaccccgtgcacgtcgatgacgttgtcgtcggcgaccacgacgttgccgttctccgcgatatacgacatggcgccgtcgacgcggtccgcgaacatggagcgcagcgtggcgagctggcggccggaagccggcacgaactcgacacccttggcgtgcagctcgtcgagcagcggccagaagtcatcggggatgttgctgtcgccgtccagcagcgtgccatccatgtccgccacgatcaggcggatgtcgtgcggcttgtcgcagatggcggtccaatcgttcgcggtcatggtgtcgttcctctcagtcgtgtgcgtgacgttttctgtttttcgagaccggccggctacttattcagcaggctggtggcgacgatctggtcggcgatggccttcgactcggcctcgttcggcccgggagccggcgccatgaacgcctgacggtagtagcgaagctcgtccagcgactcgatgatgtcggcgagggcgcggtgcccgccgttcttggcggggcggttctcatacaccgcggggtaccagcggcgcgcgagctccttcagcgtgctcacgtccacgctgcggtagtgcagatggctcatgagacccggcatgtaatggtcgaggaatttcttgtcggagccgatggtgttgcccgcgagcagcggcctgactccatccggcgtgaaccgcagcacgtattcggtgaccttgcgttccgcctcttcgagactcaggccgtgctcccattcgttgatgagccccgaacgggtgtgcatggcgcgcacgaaatcgttcatgtgccccacggcggcgtcggacggcttgatgacgtagtccacgccctcgtccaacacgttgagatcgaaatcggtcgggaccacggacacttcgacgagctcatcgccaccgaagatgtcaagtcccgtcatctcgcaatcaatccagatcaggcgcgaatccttcgcgctgtacgtttccgcatcatggctgtcgaccatcgcaagccgcctttcctgctgtgctttcctagggaacgttacaggctatagcagaccggggacgcgccgtcaggccagcgggaaagagagcagcatcgtagtgccggacggggacgaggactccaccgcgaccgagcccccataccggttcgccacgtcacgggcgagcgcgagaccgagcccgtacccttggtgcgcggtgccgtcatcgtcccgggcgaagcggcggaacagtcgttcgggatcgccgccgatgcccggtccatggtcggacacgcggatctgcgcccatttgcgatgacgcgcacacccgagcaacacggccctgccgtccggatccttgatgatgccggagtgcggcttgagcacgcccagtcgcccaccaccacgctggccgtctgggcgttgaacccccgcagcagcgcgcgcaaccggtcctgcagttcaatgaagtggaacggcttggtcaggtagtcgttcgcgccgcagtccagcccttccacgatgtcgtccacctgcgcgagcgcggtcagcatcagcgcaggtgtagtgacgccggagccgcgcagggtgcgaatcaaatccagcccgtcgccgtcgggcagccggcggtcgacgatcagcgcgtcatgctcttgccctatccaattggggccccgctaaagcgccgctaagaagacacgcgggcacgacggaagcttggtgtcgcggcacgacatgacccgccgcttcgggggaaacgggacggatataatcttggacattcgggacgcggccgcccacgcgccattacggcagcgcaaaaatggcagcgcaggaacggcagcggtacatgcatacggccaggaggactacatggcagaggaaacgcaatctatcacgacgcggcacgatgccgagaccgacccggcactgtggtggcggcaggccgtggtctaccaggtctacccgcgcagcttccaggacaccaccggctccggtctgggcgacatcaatggcatcaccgggcggatcccctatctgcggcagctgggcgtcgacgcgatctggctgtcgcccttctacccgagcgaactcgcggacggcggctacgacgtggccgactaccgtgacgtggatccgaagctcggctcgatggacgacttcgaccggctggccgccgccgcgcatgcggcagacatcaaagtggtggtggacatcgtgcccaaccacagctcccacctgcacccctggttccgtcaggcgctggcggacggccccggctcccctgcgcgcgaccggtacatcttccgcgacggcaagggcccgaacggtgacgagccgccgacccgctggcagaaccatttcggaggtccggcatggacgcgcgtggacgacggccaatggtacctgcacatgttcaccaaggagcagcccgactggaactggaggaacccggacgtgtgcgccgatttccttgagacgctgcgtttctggtgcgatcacggcgtggacgggttccgcatcgatgtggcgcacgggctcgccaaggacctcgaccgcgacgacctcgacgactacgtggtgatgagcacgaacgacatgcccgcggacggatcccacccagtgctcgaccgcgacgaggtgcacgacatctaccgtgagtggcgccgcgaggtgttcaaccgctacgatcccccgcgcttcgcggtcgccgaggcatgggtccggccggaacgccagtacctgtacgcgtcaccggatgaactggggcaggtgttcaacttcgagttcgccaaggcggattggaccttcgacgcgatgagcaaagccatcgacgaggggctggcgtgcgccgagaggtcgggctcgacgtccacctgggtgatgagcaaccatgatgtgccgcgccacgccacgcgttacgcgctgccgcaagtgccgaccggcgaataccatcagatcgccaacgactggctgctgcgtgacggcaccacctatatcgaggatcgccaggccggcgcattgcgggcacgcgccgcactgatgctcgaaatggcgctgcccggctcggcctacgtgtatcagggcgaggagctgggcctgttcgaggtggcggatattccatgggaccgcatcgaggatccctccggcctgcgcacctcgcgggcgcagtccaccaagggccgtgacggctgccgcgtgccgctgccctgggtcgcgtccgacgtgcccgagacgtacacgtccgacaagaggcacgtccatgccggctcgttcgggttctcccctgccgtcagtgacgccgaaccacacctcccgcagcccgcgtggttcaaggatttcgccatggacatccaggacgccgacgacggctccatgctgaacttctatcgtcgcgtgctgcggctgcgtcacgagatgcagactccggacaccagttgcacgttgcttcccgagaaccgtccgagcggcatgcgcgacggcgccgacggccagcccggcggcgtgatcgcctaccgtcgtgccaacggttgggcgaatctgacgaatttcggcgccacaccggtttcgctgcccaacggcgaggtgctgctctcgtccgcgccgctcaccgatgacggccggctgccgcaggatacgtccgtctggatgcggctgcggtaggcctgcccgcgcccgccacgacgcgggcggcggagccgattcgacgcggccgggcctatatgcaagatggcgggctcccctcgcaaatcgtgaggggagcccgccatcatattcatatgagccgaatcctatgaaccgatcggcatcggcctatcagttgtggaagccggtgtagttcggcgcttcggtggtcatcacgatgtcgtgcggatgcgactcgcgcaggccggcgtcggtgatgcggatgaagcggcccttctcctgcagctcggcgatgttgtgcgcgcccacatagaacatggactggtgcaggccgccgatcagctggtacagcacggcgttcagcggtccgcggtacggcacttcgccctcgacgccttccggaacgaccttgtcgttggaggtgacgtcggcctggaagtaacggtccttggagtaggacttcttgccgcgcggggccatggcacccagcgagcccatgccgcggtacagcttgtactgcttgccgtgcagcaggaccttctcgcccggagcctcctcgcagccggccagcgtgccgccgagcatgacggtgttggcaccggcgacgagcgccttggcgatgtctccggagtagtggatgccaccgtcggcgatgcacggcacgccggcggccttgcatgcctgggcggcgtcatagacggcggtgagctgcgggacaccgacaccggcgaccacgcgggtggtgcagatggagccggggccgacaccgatcttgacggcgtcgacgcccgcgtcgatcatggcctgggcgccggaacgggtggcgatgttgccgccgatgacctgcacgccgcggaaggcggggtcgcgcttgatgcggctgatcatgtcgagcgccagacgggcctcgccgttagcggtgtcgacgacgagcacatcgacaccggcctccatcagagcggaggcgcgctgccaggcgtcgccgaggaagccgatgccggcggccacgcgcagacgtccctgctcgtccttggtggcgtccgggtactgctcggtcttgacgaagtccttgacggtgatcaggccggcgagcttgccgttgtcgtcgatcagcggcagcttctcgaccttgtgctgggcgagcagacggtgggcgtcatccttggagatgttcgccggaccagtgatgaggttctccttggtcatcacgtccttgaccttgaggtggtcgtagtcttcggacgggatgaagcgcatgtcgcggttggtgatgatgccgacgaggcggttctccttgtcaacgaccggcaggccggagatgtggaacttgccgcacagcttgtcgaggtcggcgagcgtgacgtccgggttgacggtcagcgggtcggtgatcataccggactcggagcgcttgaccacatcgacctgggccgcctggtcgtcgatcgacaggttgcggtgcagcacaccgataccgccgttacgggccatggcgatggccatctcggattcggtgacggtatccatcgccgcggagatcgccggaaccttcatggtgatctcacgggtcagatgagtggtggtgtcgacttcggagggaatcacgtccgtctcgttcggcagcagcagcacgtcgtcatacgcgaggcccagcttggagaaaatcggggggacgggagcataggattgcatattcgcttcagaatttgtagccatgcattcactatatgagcgtaatgcgacgaatgcgacacgaacatggtctcgaccatcatcatcggcaggtcacgggcgccgttttttcccgtcaccgctttcgtcaaacgaatgacgtgcccgtcgccgcgcggatgcatacgactggttctccgcggcgatctccggcaggcgacgcttcagatacgggtacatcgtcgccaccgtcagcaacaccacggcgatgacgaagccgatgagcacataatggaccttgaagaacaacgtcatgatcgagccgaccgcgatcagagccgcccacccccacagaatcagcaccgctccctgcacggtgtggccgatgcgcagcatgcggtgatgcagatgcatacggtccgggtgcatcggcgactgcccgtggctgagtcggcgcacgatcgccagacacatgtccagcactggcaggaacagcaccaggatcggcagcaggatcggcatgaacaccggcaggtacacgctggcatgaatcgacgccggatccagacggccggtcatcacgattgacgcgcaggtgatgagatacccgagcagcatcgagccggagtcgcccatgaacagcttggccggatgccagttgtgcaggatgaacccgacgcagatgccgaccatcgccacgtcgatcagcgtcgccatcgaggcgtaggacggcgaattgcgcgcgatgatgtaggagtacgcggcgaacgcgacgccgccgatggcgacgatgcccgccgcgaggccgtccaagccgtcgacgaaattgaccgcgttgatcgacgcgacgatcagtatcgcggtgatcgtcaccgagatactggggctggcggtgatcagggagccgagcggcagcgatatgatctgcaggccgccccacgccacgaacaccgagatcagcagctgcccggccatcttcagcatccagtccagatcccacaggtcgtcggccatgcccagcaggcatatcagcaccgcgccggcgaggatcacccactcctggttgttgttctcgaacagtccggtcgtgaatgcgatgcgactggagtagatcattgcgaacgcgaatccgatcagcatgcccagtccgcccatgcgcggcgtcgggatggtgtgcacgtcgcgcgcacgaacctctccgaccgcgccgatatggatggcgacatggcgaatcagcggcgtgaccagccaggtgacgccgcctgcgatggcggcgatcagcagatatatcctcatgcgcccagaccaccaccgttcatgtgcacggccttgcgcacgacgggctgagggatgacaccctctcgcaggatgacgatgccgtcgcgctcatgagggtcggcggcgaccaccgtgctggcgacatggccttgcgtcggcccgccgtcaagatacagctgcacatcgtcgccgaacgcctgcacggcctcttcgaccgtctgcgcgctttcgtcgccggaacggttcgcgctcgacgcggcaagaggaccgagctcattcaatatgcgcagggtcagagccgaattcggcacgcggatgccctgcgtacgcctgccctgcggggtggcactgaccgtggcgagcgtgcagtcctcgcgggccaccgcgatcggcgagaacgcaccaggcaggaactgcgcggccagccggttcagcggcgacggcaggtcgagcccgagcccgtccaactggtcgacggatgccagcagcacctgcagcgctttgaagcgcgggcggctcttgacctgatagatgcggtcgattgcggcctcgttgcgcgggtcgcaggccatgccatacaccgtgtcggtgggaatgaccaccaagcctccgcctgcgatgaccgacgccgcctcggcgagggattcctcattcaccttgcgaaccgcactcatcagacctcccgtatcgcgtatcacgcccatcgcggcggtcacatgccgccgcgcgtatccgaataccgctatccaagtattatggcacgtcctgccacaccgatggtaggccggtgcatggcccgacgccacgggttcgctctcccccgcgtcgcgcgggccggcctggacacggcttcccattgcaccattgcgccacgacttggcgctggccggcgccggcgacgacgggcctcatgtgacggtacggcggagagacacgaccgtatccgcccgcgagcgcgaggaaatgctcgccggcaaactctacaatcccgccgaccccgagctctccgctatgcgagagcgcgcaggcgacttgtgcacccggttcaacgcgctgcctcggggagaccacgccggccgagccgcggtactggacgagctgctgccgccgatgcatccgatccggttccaggaccgcaacgtgcggcgtgcggctgacgggtcgtattacgactacgagtatggcaagccgatcgtgatcgggtcgaactgctggttcggcggcaatgtgacggtggtcggcggcgtgacgatcggcgagggctgcgtgatcggcgccggctcggcccggccacggcatcagatcctgggtcaggatctgaccgcgaacaggtaccggggccggccggtccagtcgtcgccggtataagcctggccgaacccgttggcctgtgcgaaggagaccagccgcggcccctgagagatgtcatgctccatcaccagcacgccgccggggcgcagcaatcccgccgctcgcatcacgatccgctccggtatcagcgtgccgtcggcggagccgccatacagcgccgccttcggatcatggtcgcgcacttcgggctgttcggggatctgcgcttcggggatgtacggcggattcgtgaccaccatgtcgatggtgccgtcaaactgggccagcgtcgtgccgctggtggcgtcgccgagctcgagatgataattatcggcggccagcgggtcgagacgtgatatcctccgccagttgcgcatcgtccagtcataggtgcgcgacaccttctcgaccgcccacacctgcgcgccgcgcacctcggtgaccagggacagtccgatggcgccgctgcccgcgcacaaatccacgatacgcggggtggacagccgttcgcgcgtgagccagtcgatgccggcctgcaccacggtctcggtttccgggcgcgggatgaacacgcccggaccgacttccagatcgaggtagcggaacggggcatggcctgtgatgtactgcaacggttcacgtgcggcccgccgagcgatcatggcgtggaatcgggcgagcgccgtggtgacggcatcgcccgcagtggcggagctgtcggagctcgcgtcgccggcatccggggcatcaaaactcgcatgctcgtgcggcaggccgtccagaggctcccccatcaacatcgccttgtctatgtcgcgcaggtcgcggccgcacgcctcggcgagcaacaacttggcatcatgctcgggcgtgtcgatgtcggcgtcatgcagcgtccgcgccgcggagcgtatcacgtctgtcacgtcatggatggattcggatgtcatggtgtccttccgctcgttggtggctcatcgtctcagggcgttcatatcacggcgtttcgcaccggggcgtctgccggcatattcgccgttgcgtcgctaagtgcgcgccgaaacgaagtacgcgcgcacatagcgacgcaaaccacggattttccgttcctaagtgcgcgcacttgtcgtttcggcgcgcacttagcgacgcagagacatcaatgggggtgcgattccccagggaaccatcactctgaccccgccgatggccggtcactgctggttggcgagccgctcggcctcgtcggcttggatgtcggagtcgatcacggcctgcaggtcgccgtcgagcacggcgtcgaggttgtacgccttgtagttggtgcggtggtcgacgatgcggttctccgggaagttgtaggtgcggatgcgctcggaacggtcgagcgaacgcacctgcgagtggcgcatatcggcggcctcggcggcctcctgctcatgcttcatggcgagcaggcgcgatttcaggacccgcaacgcggcggcgcggttctggatctgcgacttctcatcctgcatgctcaccacgatgccagtggggatgtgcgtcatgcgcacggcggagtacgtggtgttcacggactgtccgccgggaccggagctcatgaagatgtcgattttcaggtccttcggatcgatctcgatctcgtcgtcgtcctcgtcggcctcggggaacacgattacaccggccgcggaggtctggatgcggccctgcgattcggtgacggggatgcgctgcacgcggtgcacgccgccctcgtatttcaggctcgcccacacaccgtcctccggcgcgggcgtgcccttggcgcgaatggcgatctgcacgtccttgacgccgccgagctcggtggtgttctcggactgcacggtgacggcccagccgcgcttctcagcgtatcgcagatacatgcgcagcaggtcgccggcgaacagcgccgcctcctcgccgcccgtaccggccttgatctccatgatgacgtcccgggcgtcatcggggtcgcgcgggatcagcgcgttccgcagcttctcctcggccgccggcagctcggcttcgagccgcttggcctcatcggcgaattcgggatcctcccccgccatctcgcgcgcggcctcaaggtcgtcgcgcacggccgtgtatgactgatacgcggatacaatcgcgccgagttcggcatgacgacgacccagcttgcgcatcttatcggggttcgtcaccacctcggggctcgccatctgctgttcgatggattggtattcctccaacgcggtctgtgccgcggggaactgctcgactgccatgtctggcttgtccttccggatagtaacaacggtcggcaccgcgtcatcatcgctgtcgcgacgccattacagatacaaaaacgccagtcccccgagcgggtgcgccgaagcgcgcccaacccgtgcgggactggcgtcagatacgctacttggtcttcttgccgtaacgcttctcgaagcgagcgacgcggccaccggtgtccagaatcttctgcttgccggtgtagaaggggtggcacttcgagcacacgtcgaccgtcatgtggtcgcccttgtaggtggaacgagtgacgaaggtgttgccgcatgagcacaggacttcaacggcatgataatcaggatggataccctgctgcatggttttgtctcctaggggattcgggggacccgggtcgccgcgccccgatggctggcgtgaaccggaacctacggaagtatacgccgaggcatggatttcagtggggccgcaggggcttgaaccctggaccggcggattatgagtccgatgctctaaccgactgagctacagccccacgttggcgaataggccaaccgtactattgtatagcagaccatcggacttgcgacaccctcccaaccgcccatcgtctgccacggctatcatgtcggcagggccggcaatcgggccgggacacgcggaaaggaacgcacatgcgcattgcggtaccgctgcccggcacgatgtgggcgttcgacgtcatctccatcatccagatcttcgacgacgattccgtcatgtacggctcgtccgaccgtccggtcatcgacttcatcgcgaatgcaagctccaaggcactcgaccacggtatgtccatcgccaccaccgcgctgcgcgactaccacgagaaacctgatctgatcatcatccccggtttcgccaacccgcatgagatcgccaccgacaggcgcaccggggacgccaaggcatggctgttcacagccgatcccgccgacgcgctcgccatccgcgactggctggtcgcgtcccaccgcgagggcgtggagatcgcggccatgtgcacgggcgtgttcgcgctggcatggaccggtctgctcgacggcgtggaatgcaccacgcacctgccgttcctcgacgatttggccgcgcagtttcccaaggcgctggtgcagaaggaccgtctgctgacgcacaacgcgaagcagcgcatctggacgtccgccggcggcagcatctgtctcgacctgtgcatcgcgctactcgccgaacatgccgggcagtccctggcgacggcggaggcgaacatgctgatgatgcattacccccgttcggtggccacccggcgcagcgacggcgctccatccgtcttgccgcgaccgtcccggcagagtgacgagatcatcgcgctgacccgcagggtccgcgagcatctcagttatgactggacgctgacgacgcttgcacagacctcccactcctccacgcgctcgttccagcgccggttcagcgaggtcatgggggtgccgccgagcacctggctgctgacggagcgtctgaacgccgccaaggaactgctggagctcaccgatctgccgatgcagcagatcgcactgagaacgggactgcgcaacgcggattcgctgcgcaagcatttctccgccgcgttcggcgtcaatccgagtcggtatcgtcaggattttttgcgcaccgaattgcgtccgacggaaaacgtgtgagcccgctggccggcgaaacgaacatgaggagtcggatatcggccaaatgacgcggatctctctgtgttcgttttgttcggtactgtgcgcattcctcacacttttcttattgagaatgattcgctgaaccatcggcggggcaaagtggcgcgttcttaccgatatttggcgcgaaccgaccgcatcggcacccggttttcccgcgaccgacgcttagactcggacttgaaacaatgttgttaacgccatcatgacagacgcggatgtgtgtcatgccggcgcgatgaaaggatacgaacatgtggcctatcctcttggccctggtccccgcattcggctggggttttcagggcattgtcatgcagaaggtcggcggcaccaccgccaacaagcagatgggcatggtgctcaccacgctgctgttcggtatcgtggtgctgatcttccacccgatcaactggtcgtggacgctgatcgcggccgcggccatcaacggcatcccgtggagcatcgcgcagatactgcagatcaagtccttcgactatctgggcgtggcccgcgccatgccgctgtccactggcatgcagctggtgttcaccaccctgctcggcgcgctgttcttccatgaatggacgcacggctggcagttcggcttcggcatctgcgcgctcgtcgtcatcatcgtcggcgtcgcctgcaccgccttccaggagaagagcgaggacaagggtccgtcgaacctgaagcgcggcctgctcatcaccctgatctcctcactgctgtataccagctacgccgccgccggcaagttcttctcggtctccagctgggacatgctgttcccgcaggccgtgttcatggtgctcggcacgacaatcatctccttctgcatgagcggcaaggacgcgatggaccccgaaatcggcgtgttcggcaagaagagctggatgaacatgagcaccggcgccctgttcgccaccgcgaacctcaccgtgatgctgtccaatgagatgaacggtctggcggtcggctggacgctgtcgcagatgaacgtcatcgtcgccacgctgggaggcctgttcattctcaaggagaagaagaccaagaaggagatggcgttcgtcatcgccggcatgattctcatcgcgctcggcggcatcctgatcggcatcacaaagaacgcatgaccgccgcccgcgcatcatcaaccatcaaccatcaacaagtcaacaagggagtatcaaccatgatcaatgtcggtttcatcggatgcggcgccatgggccgcgaccacgtgcgtcggatcacggacaagtgcggcaacgcgcaggtcgtcggcatatacgacaccgtgctcggcaacgcgaagcaggccatcgaagacaaccgcctcgacgcgatgatctacgattcggccgatgcactgatcgacgacccgaacgtcgacgccgtcgtcatcgccagccgcaacgacgtgcatctcgacccgctgctgcacactatcgcgatcggcaagccgacgttcaccgaaaagccgatgaccatcaacggctccgacagctggaaggtcgtcgaagccgaggtggccaagggccgcaaaaccattcaggtcggtttcaactggcgcttcgaccccggctacgacgcgatgaagaccttcgtcggcgacggacagatcggcgccctgctgatggccggcatgcgtcactacaacgcgcaggcatccacgagctactacggcaccgacaacgtcatcaacgacacgctcatccacaacttcgacatgctgcattacatgttcgacggcgacatcaccagcgttgagatgaagttcgcccggatgaacacgctcaacccgaacggggagtccttgcgcgaaccgcagctggccatcgtcgagttctccgacggagccctcgccacagccgaggcgaacgtcaactgccagtatggctacgacatccaatgccgcctggtcggcgagtccggcatcatctcgctgccggatgtcgccacgccggaggtgcgcaaggccggtcagatcagccacgcgatctcgtccgcctggttcgaccgattcatcgaggcatacgaccgcgagttcgaccggttcttcgcgaatatcgaggccgaccggcagccgggcggcaaggaggcgaccgcgtgggacggctatgtggcgaacgtggttgccgacgccgcgctggacagcctgcaccacggcgggcgcatccccgtgacgctcaacgagcagccggcgctgtaccggtaatccgccgtttgttcaatggctcaggccgcccaccacggacgcagcgggtaccagttgcccttcggcagcccctccttgtcgggcttgacggcgaggaactggtgcacctggatgccgttgagctcgaagttcaactcgcacgcggccagatacaggccgtacaccttcgcccgctcgtagccgacctgcttgacggcgtcggcccagttggccttgagattggcgttccaatgatgcagcgtcagcgcgtaatgctgccgcaggttctcctggttgacgacctcgaagccggcgtcgtgcagcgccgactcgatgaacccgggcgaggcgaggtcgccgtcggggaagatgtatcggtcgaggaacgcgtccgttccgggccggttgttcggcttgtccttggagatcgtgatctggtggttgagcaggcggccggccggcttgagcagcttgaacatctcatcgaagtagtggcggtagttcttcgcgcccacatgttccatcatgcccaccgaggtgatgccgtcgaagtctcgttccggcacttcgcggtagtccatcacgcgcagctcggccagattctccagcccttcgcacctgatccactcctgaccgtactcgatctgctcgtgcgacagcgatacgcccagtgccttgatgccgcgcttggctgcggcgatgaccagagcgccccagccgcatccgatgtcgagcatgcggtcgccgggcttgaggtccagcttgtcgagcaccaggtcgattttgttgcgctgcgcgtcatccaggctcatgtcgggcgtgtcgaacaccgcgcacgtgtacgtcatcgacggtccgatgaagtcggcgtagaactcgttcgacaggtcataatggaagctgacggtctcggagtcggccttttcggtgtgcgggaacagaccggacttgatgcgttcgaatttcgaggggccttcggactgcggcacctccaccttgtggtagccgtggctgagaacggccgcccccatgcgcgccagttcgagcggagatggctttcggatgtacgatgccagttcgacgagcttgcgcagctgcggatacgggtcggccacgtccagtccttcgatgtcgaagtagcccaggatgtatgcgcgggccaaaccgatctcgttcaggttgctcgccaactgatagatggccttaggactggtgacccggacctgtaggtcggcgtcttccggcccgaacgtcgatccgtcgaaggcttcgatgcacaccggcgcgccctctttgaggaccgcctgcgccatttcacttaccaacatggtttttccactgcccatgtttcgcctcttttcccaacgactgcgacttgccggatatggcaatcaccgtgtcactgtagtcccgcgtcgtcatttttcgcgctgcgaggaaacaaaaatcgctcactatgcatgcatcgggcaaccactatgtgaccagccactctgaaagcgaacatttggcggatatatatggacagcgcggccgcgccagtcgcattccgcatgtgaatcggaacgcggccagcggggccgcggttttcaggatgatcccggaccagccgtcatgagacggcgttcatgtactccttcagggattcgccgatgccgccggactcgccagacgacttcaacgcggtgacgtgcccatcggtatcgacgtcaagcactccggagattgggttgatggcattgtagacgacgtcatattcgttgagtagcagcaggaactcggcggtgccactcgccttcgcctcgttcagcagcgtggttgacgtctcgcgtcgaacgatgccgctcttgtcgatgccgcccacctgcgcgacctcaatgatgtcgccgactttcgcgtcgcccttgatgactttggtgacacgcacccgggtgacggtctccggcacgcccagcgcgtccatgtcgatgtcgtcctccgtcagcccgtattgcgggttcgtttcaggcgttccggacgtgaaatcgatctcgggatacaggatgcgctcgcgcgagtcgagcgggacaccggtgaccaccagaccggcggccttgacgccctcttcgacggaagagtagccgggatagtcggcggtgatggactcggcggtcttcgccgtggtctccgtcgcggtcttcgccgtattctgcgtcgagtggccagcggtcggagagccgacggaatgcatatgcacggcgacacctaccaccagcgccgcaacgagcgccacgacggcgagcgtgcccttgatgacgtttgactgcttcatcagtaacagctcctcacgtaactcatgtcatatgcctgaggcatacggatatatctttcaatcacagttcagcaacggtattcatcagcggccagaccggtcggctgattgatccgtcgattatttttttcatatcagtctccgatgtccagcatgcagtgaatccgcgccaacttcgccgttgacagagcattgagtaaagaacagccgtttttaaaagaaaaaataagagaaacgctgtaaattcaacgtttctctcacttttcatcaatgccgcagaccggaatcgaaccgttttacttaatctcaaatattgatagaaaggggctttgaagacttcatcacggttacggtgttcaaaaagtgttcaaacgtttgttgcatacaaactgaaatttgtcatatccctatttctgagtagattttttcgacaaacggtgacttatgttcgatatacttctcaatatcaaatggatagagcgcagcgccttcttctttaattctactgtattcacgcacagcttccggatgagaacgcaaatattcacggaaagcaatatgccttttcagttcctcagaatctcgcgggcatacatatagatgatgcttccgcaaatgggttttgccttcatatttaaatgcttcccgtccggcaataccaaggtttccttcatggtgatagtcgattctttctaaggcagagattacagcgtcaagcatggagtaatctttaatgacgacatcaatatcaataatcggtttcgctgataaaccatgcactgaagtgctgccaacatgttctatcgcaagagccagttgatcaagagcttcctgaatttcactcttgatttcacaaaaatcccgtgcccagtgtttatcataaggtagcacaacaacatgctttgtaatcattctctttacctctacaaatcccgatttgtctgtttcacaatgtcaataagaggaagaatgacaggcttgcttttcagaatctcggtatttcatcataaagtgttcaaaggtgttcaaacattttatataaaaaacagctatgaccaaggtaagtattttcaaaggccggcatcggcatatactgtgatctatgattactacgtttactattcgcaacgtcgccaatgaagacggtgccgcgcagatcagcgatttcggcgctcacgtgctctcctggacgcccgcgggcggccatcccgccgtatggcagcccaaggccgtctatctgggcgaaccgatccgcggaggcgtgcccgtggtactgccatggttcgcactcggtttcgagcatggcgaaatcgccggtaagaagccgaagcacgggttcgcccgcaccactgtctggcatgtggacgaggacgcgaccgacgaccgacgcatccgatacacgctgtccgacgccgacgcgacgcccgaactgctcgcccagctgcattccggggcctccccgcggttccatgcggtctacgacatcgaagtcggcaaggagctgaccatgacgctgaccgtcaccaacgacggtaccgagccgctgcgctatgagaccgcgctgcacacgcacttccatgtcggcgacctgacccaggtgagcctacacggattggagggctccgactatctcgacgccacggtcgccgggtaccctccccgcgtgcagcccgatgagccggtgaccttcgacggcaccacggtcgaccgcatctactactccaccgacacgttgcgtctggatgacccggcatgggatcgcgtcatcgtcatcgaggcccatggcacgaagcagaccgtcacatggaacccgggaaccgcggccgacaccgaaatcggcgacatgcagcccggcgaatggcgcgatttcgtagccatcgaggcagccgcctgccgcgagtatgccatcgagctcgctcccggcgaatcgcacgcgctcacgcagcgcatcagcgtcgagaaccgctgaaaaaccgattcattcatacggccgccgcatctgccggcggccgtcaccatctccggcggcaaccgttcacagcagctgatacagcgcggcgctggcgttggctatcgccgtccacgacgagccggaagtcatgatgacgaacgcatagtcgcccttgccggaatatacgatgcccgcatcatgcaggtacgagtcgcggaatccgaccttgtcggcaacggttccgttgccgccgatgccggccggtatgccgctgcggtactgctgccgtttcatcaggccgatcaccatgtcccggtcgtcgtcgttccagatctcgccccgatacagtttggtcaggatcagcgccagatcggccgatgtcgtgcgcacgtccagataatgcaatgtcgtgttcttcgcgccgagcgcgttcgcctgctgcgttactttgtcgtagccggcgccgttatcgcgcatcagccatgccttgggacattcgttgtcggaatcaacgatcatcgtggtcaggcactgctgcagcgtcatgccgttgagcggcgaatcccatgtcatctcgcctaattccacggccgtcaccatcgaatgcgccacgaacagcttgtacgtgctcgccgatgcgaacacctgggaggagtcgatgtcgacgagtgtgccggcattgctcagatcgaccacggagacggaatatctcgcgccggaaaacacaccggccagcgcggcggatgcctgggcagtcaggtcgcgttcgggctgggccggagccggcatggccgccttgaacatgctccgagacgccgattgggaacgaaccctgccggaccccgacttgtcggagaaactttcgtcggaggagccgtcatcggcggcactgccgtcggtggggtcgaccgtggcaccggatcgggccgcaccggctgatgaaacgctgccggacgagccatcgccatcgttcgagcacccacgcacggacaatagcaccaccatcgtcaccacggagaacatcgcgatcagcaccgtcagacggcggcgcacatacgtcagctcacgggtggatattattcggccgccaagcgggttcgaccgccgacgagggccgacacgaccgccggcatgcgtcacgatgccgcgcaggatacgtcccgtcctgcgccgcggcgggcgcatatgctttgccatcgcgcacctccccgactgctcacatcgacgcccccattgtaaccccccgaacgcagctagtcaggggcgagcatccacaccttggtcacccgtcatggcacggctaagacaggtcatatatgacggccggacgtcggcagtatcggcaggtacgtcaatgccgccgacgcccggccggtcaatgattgctcagcgaccgcggcggaacggcgccgcgttgcgcttgccgtgcgacttgcggaatcccgcggccttgcgcatggcacggttcggcccgctctggctcctgcggttccgcccgtcacgacggttgtcaccgtcgttgttgtgcgagccgcccttgcggtcctcgaacgacgtgtcgtggaaacgcccgttgcgacggttgctgcggcgatcggcctcgcgaccgtcaaacggcgtgttgaaatcgtcgccgaagtcgttgccgcggcgcttcttgccgcccttgcgaccctcagcgtcacggtactgacgccggtcgtcaaaacggccgtcatcgaagccggagcgcccgtatccgtcgaaacggtcccgcttggtggtgtgcttgcgcttgccgtgcggcttgccctcgccgatgatcgacatctgcgattcgtcccgatggtcgaaccggtattgggcgctctcgcggccctccatttcggcgccgtcatgacgatggccgtcacggcgtgcggacggacgggagaaatcatgctcgccgccacgggcgcgggacttgcggccggaacgtccccgcccgccgcgcgcctcaccaccgcgaccgcccttgcgatcggagcggccggcgcgctcggaacggcgcaaagcctcaagcgccttgtccagcgaccagccctcgacgaccggcgcgtgctcgccgaccaactcggtcagatcttcggacgccggcgtgattgccaccgacttgactcggatgccggcgcgcttcatcatctggcgagtgctgcgggcctgattcggcaggacgagcgtcaccacgtcaccctgttcgccggcgcgcgcagtgcggccggaacgatgcaggaacgatttggggtcggccggcggatcggtctgcacgaccagcgtcacatcatggacgtcgatgccgcgagcggccacgtcggtggcaaccaatacgcgtaccaggcccttctcgaacgccaacaggttgcggtcacgctgcttctggctgaggttgccctgcagatcgaccgcgggaatgccctcgtcgatcagtttcttcgccatcttcttggcctggaacttggtgcgcgtgaacaggatgcgcttgccggtgccgctggccagcagacgaatcacctcatgcttgttgccctgcgacacttcgaacacgtgatgggtcatcgtgtcgacctgcgagacgacggaactgaccgcatgcactttcgcatccggcaggaaccgcttgaccagcgcgtccactccgtggtcgagcgtcgccgagaacagcatacgctgaccgcgtgaatcggtctgctccagcagacgcgtgacgggcggcaggaatcccatgtcggccatctcgtcggcctcgtcgagaatcgtgatctccacggcgtccagagacagcttgccctgacgcagcagatcctcaagacgtcccgggcaagcgacgacgatatcggcgcccgcgcgaagccccgcgacctggcgggcgtagctcacgccgccatacacggtgacggtgctcatgccgtacgcctcggcgagcggctgaatcacctcgtcgatctggttgacgagctcacgggtcggcgcgagcaccaatccgcgcggacgcggcagggacgcctgctcccgcgcggccttctcgtcggacgccttgcgaatctgctcgaattccttcatggccacttcggtgacgctgtgctcgctcaggcgggcgaccagcggaatggcgaatgcgagcgtcttgccggagccagtctgcccgcgaccgagcagatcgacgccgttcagcgaatcggcgagcgtgtccgcctgaatcgggaacgcggtgaccttgccgtccatggcgagcacgtgcaccagcggcttgggcacgccgagctcggcgaacgtcggagcgacatcctgctccttgtcatctgcggaagcatcaagggcggcatcgatatcatctatatcaacagtgtccgtatcagtatgcataacggaacgcgcagcggaaccagccgcgaaatcatggtgacgtttcggcacaatagcctttcaacaacgaagccgatcacttacgcggcttctgacggagtgtccaccatatcagcaccccctccccaggatgccgggccggacgcggcgcggcgcggcggtttcgctattaccatgttatcgggccgccgatgacgtgccaatgcgcgccaatgccatatcgactcattgagagaggttcaacgatgaagaaaggactgtccccgacgacggggcgggtcatgctgctgtgctgcgcgatgctgtggggaggcagctatcccatagccaaggtcgcgatgggtgtcgtcacgccgcaatggctgatgggattgcggctggtcggcgcgtcgacgatcatgctgatcctgtttcgcaagcgaatcgtaccgtatctgaacaaatccatcatcatcccggggctggtgaccgggctcacgtattggggcacgatgatcagccagacggtcggcctgacgatgatcgaacccggccgcagcgcattcctgacctcggcgtattgcgtgctggtgccgttcgtctcatggctgctgatgcggcagcgccctgcggcgcgcaacatcgtcgcggctgccctgtgcctgaccggcgtcggcttcgtgtcgctcgggtccgggctgggcgggctcacgattggcaccggcgacctgttgacgctgctgtgcgcggtgatcttttcgttcaatctggtgtgtctgggcaagtggagccgcgtcatcgacccggtggcgctgacgttcgcgcagttcgtgacggccggcgtgtgcttcatagtcggcgcgtcgttcagcgaaccggcgccgaacgcctcatggcttgcgccgggcgtcctcgcatgcctggtctacctgtttctcggcgcgacgatgctggctcagatcatgcagaacgtcgggctcaaggtgaccccgccttcgcaggcgtcgatcatcatgtgcctggagaccgtgttcagcatggtgttttcggtgctgttctatggagagactgtcagtggtgctgcggcgaccggattcgcgctgattttcctggcgatactggtgtcgcagatccggctcaacgggcgtctgctggagcgggtcggccgcaaggcgcggtagtggtgccaccacacggcaccacaccaccacacggcaccacaccaccacacggcaccacaccaccgtgcgacaccacgccaccgtgcgacacgcccggagtgcgtagcacaatcatcgaatcgtcactggccatgcattgccattgcgccgttcttcgattcgcaccttgcgattgtgctacgcattccgggcgtgtcgcatgcaatcgtgcggtcagcggcgacgcagcttggcgagctgatagacctcgtcggaggccgcggcgacttctggactggtcacgcacttgccctcctcatgggcgagcgccatgatgtcgtcctgcgtggccatgtcgagattgccggtcggctcgtcggcgaggacaatcgacggaccatagctcagcgcccgcgcgatggcgacgcgctgccggagtcgccgctcgtaccagtcgaaccggaaccacccgaatcagagctgctgccgggagcgccgcccatgtcggcgccgcgaccgaactgctcctcctggctggcggtctgggtctcctgcgaggagacgcagctggttcgacacgggcaccgacgccacggccccgccggccacgccaagcgcgataccgcacatcgtcacgatcagcagctcgattgcgaactgcgccgccaccttgaccttcttcacgccgatggcggtgagtacgccgacctcgtatttgcgttcgcagatgttgaacagattgagcacgaccgcaccgaccgccagtacgacgataagcagcgtgagggcgaacttggcgaggttgtcgagcggcacgaggctcgattcgtggttctccacgtcggcggactgcacggtgcaggtgtcgtccagtccggccttccggacgtcggaagcgaaggtctcgtagtcgtcggcgctgccgagcacgtaggtgtagctcagctgggtcgtggtggtggtgtcatcgtcgttcgcggtggtgtcggcgtcctgcgaggtgccgcccatcgggcccatcgcgctggtgttgctggacgtgctgttcttgtagatgccgccgatggtgaacgtgtaggtcgtcgacgtgtcggacgggttggtgacggtgatctcgtcgccgaccttcaggccgttgaagtcggcgagcgccttggagatgatggccttgccgttgtccgactcaccatagccgaacacttcgccggacgacatcgtgaacgtgccgttcgccgcgttggcgatggcggtgtccgacgagaagccggtgagcgtgaagtcgccggaggtcatcatcatgccgctaagagagaacgtcacgaccgtcgaatcttgtctggctcttttctgaaaactctctgaacggagaaatgcgatattatgccggataccgtcgcattcgacggcttccgattcgtcacaggtaggttttcagcgccagatcaacggtgagtacgatgccggcgagcacagccgcgatgcgcatgatccgggccgggatcctgcgagtgacgggcgacgctatgtatccgccgatgaagcagccgacgcacagcaggatggccgcaggccagtccacgacgccgcgcacgatgaagatgaccgacgcgctgatgttcgcaccggtgccgatcagcgtcttgagcgcattgatctgatggaacggaccgatcttgcctgcgtcgagcaccgcgagcgcgcatgtgccggcaccggcgccgaaatatccgctgtataccgccacgaacgcgacgccgagccatatccaccatgggtccttggacatgggttgcgtcgatgcgggagccgacgcgggcgcgccgtcgctcccctgcccttgtggcgtcgtcagggaactggcctgggccatgacgtccgccgcggcctgccgcgcctgcatgcggccgcgcggattgactgcaatgatcagcgagctgaacaggatcagcggcggaacggcgaattcgaagatcttcgggtcgaggctgagcagcagcgcagcgccggcgacgcctcccaccgcgccgatgcttacgtaggtgatggaacgcagccgctgcccgcgcagctccttgcgggcgcccagcacgccaccgatgccggtgccgatcacgccgacggtattgctcgcgttggcgaggaccggcggaatacccagcgccagcagggccggatacgataccagcgaagacgcgccgaccgcatatcccacgaatccggcaccgatgccggccagcaggatcagcagcatcgtcatcagcgaaaaaccggcaatcaccaccgcatcaactccccgcatatatggacatcccgactcagggagaatacgtcaaagcggcacggcccgcagccgctcgtcaacatagcggacatgaatcacgatgcgcgacgcggtcgcacgatggcccgcgctacagcgatccgagtgctcaggcctccccgcgcggcaccgcgcccgacaaggacgccgcatgattggccacgcgcagttgcccgtaccccagcgcccgcgtgaaatggtgcgcgcacagaccattactttccgcaggattatggcatcccgcgatattgcaggtacgttccgacataacagcccccttccaccgcccccatggatcacggtgatcttctctgaggcttctgatgtttttgtgggttagattgcgggttgtggcagtcggatgtcgagtccgccgcatctgggcatgaccagggcgatgaggttggtgacgcggtggaagccgtaggccatgcggacggtgaccttgatcctgttgctgaacgcctccgactgcccggcggtcagcctgtcggggtccttcaatacggcgcacccggcgccgcgcatgcgcctggccgcctccccgtcgccaccgcgcgggcgaccgccgtcacggcggcggtcattgcttcgtcgcgatcaccgacgtcgcggctgtcgcggcgaaccccttgagtacgtctgccatcacgtcacggtcctcggcgtcaatgccgcggacggcggcgagcatgaccggcaacgactgcgtccaatgcgaggtgagttcgccgaacgtgtcatacccgccggcctcaaggacggcgaacaggttctcgatgaaccggcggcgatgctcgtcatcgaacttcgccatccacccgttgatcgtgcgcgccagataccgggagctcgcggacaggccgccggcgtgcacgaactcgccgcgctcgacctgccagttcaacgcgaaatgctgcatgatgctggcgccgtcgctggagacgatcgtatagccgtcctccacatgctcgcgcatctcgaacagcatgccgacgatcgacgattccggcaccgacttgtcgacgagcggcgcgacccgcgcataaccgggagtatcgaagaagtcggcgtcgaagcccggcccgtcatggcagaacacggcgataaggcgctcctgcaccgcggcaggcgcgtttgcggcctcatacaccgccagattgccgcctttggaatggccgccgaccatgagcgggccgtcccggagccccgcgatgtcggccagataccgcgcggcggactcctgcgcggcgaccggacgacggaacgccatcgcgaaatcctccttccagccgacgatcgtgctgtcggtgccgcggaacgcgacgtacgatgagccgtcgccgacgtcgaacacgcaggcggagaactgcttggtggtctcggggtcgaactcgtccacgtagccgccgacgcgcagatcccgccagcgcgggctttcgcacatcgcccgcaacaggtcgacattcatcgacggcgaccacaccttgccgaacatgtcgtcatagcattccgcgcgcagcaggtccctgacgcccaccatggcgaggtcgacgtccatcgcctccgcatcgagtctcggcacgttgacgggcatccgcgcgtatgacagctgcgcgagcgccagactgtcgacctcgttgaacggacggtcggcgaacgtgtcctcgttcgcgcggatgtcatcgatgatgttccccatggcggcctcccgtgatgccatcgattctacgcgctccccttcacacgcgacgccccggccgcctggcacgcgccgacacgcactacaatggtctggtcacgtcaacatcacgcatgcatcccatgcacgccaagcggtttcaagcgcgaaggagagcactatgacgcacatcgacaccacctgtgtccagggcggataccagccgggcaacggggagtcccgcactcccccgatcatccaggccacgacgttcaagtacacgtcgagcgagcagatgagccgactgttcgacctgtccgaatccggctacttctacacccgtctgcagaacccgaccaacgacacggtcgccgccaagatctgcgagctcgaaggcggcgcggccgcgatgctcaccagctccggccaggcggcgaacttcttcgccctgttcaacatctgcaacgcgggcgaccatatcgtggcctcgtccgcgatctacggcggcacgttcaacctcatcaacgtgacgatgcgcaagatgggcatcgaatgcacgttcgtgagccccgactgcacgcccgaggagctggacgccgcgttccggccgaacaccaaggccgtgttcggcgaatccatctccaacccggcgctcatcgtgctggacttcgacaagttcaccgccgccgcgcacgaccacggcgtgccgatcatcgtcgacaacacgttccccacgccggtcaactgccgcccgttcgactacggcgtcgacatcgtcacgcacgcgaccaccaagtacatggacggccacggctcctgcgtgggcggcgcgatcgtcgactccggccgcttcgactggatggcccacgccgacaagttcccgggactgaccacgcccgacgactcgtaccacggcgtcacctacgccaccgacttcggcccggccgcctacatcatcaaggccaccgcgcagctcatgcgcgacttcggttccacgccggcgccgatcaactcgtggatcatgggcatgcacctggagtcgctggccgtgcgcatggaacgccattgcgccaacgcactcgccgtggcgaggttcctcgaagccgacccgcgcatctcatgggtgagctacccggggctggaaggcgaccgcaaccatgcgctggccgccaagtacatgccgaacggcacgtgcggcgtgatctccttcggcgtgcccggcgggcgtggcacggtttcctcgctgctcgaccatttccggatgatctcgatcgccacgcacgtggcggatgcgcgcagctgcacgctctacccggcaggcaccacccaccgccagctcaccgaggagcagcttgaggaggccggcgtcggcatcgacctggtacgcctgagctgcggcatcgaaaacgccgatgacatcatcgccgacctcaggcaggccatggacgccgtgctctgatcaatcatcgatttcgctcagccggctcgcaaaatcattctcggacacgctctcccggatccgcttcgcgagccggcaccagccagcggggaagcccaatcacttcagccgacgtggcgctcgaagcggtggaagccggtgatgcggtcgatctcggccatggcgtcggcggggatctggaagccggatgccttgaggttgttctccagctggccgggcttgctcgccccggcgatcacgcagctgatttcaggatgctgcaggatccatgccatcgacaggaccggcgggttcgtgccaagctcgtcggcgacgccgcgcagccgctccaccatgtccaggttctcatcggtgagcaggtcgttgatctggtgatccgcctgccacgtggcacgcgacccggccggcagcggctgaaccacagtgatcgggtacagaatgacgcttcagcatgccgccgaccaccgtggccgacacggcgccgatcacagcgccgggcaacagggcgagcgctcccagcaccgtgccggcggtgaagatcgcgatcgccatgatgaacagggtcttcgtggcgaacttgcgcaccatgaacggcgagctggggatcgacaccgacagcaacagcaggtagccggcggtcagccattgcacgaccgatgcgctgatcgagaattcctccatcagtgtggagtaggcgatgttcagcgacgcttccgacaggatgccgaggaacgtcaggatggccaaagacaccacgacgatgacgagtttcgtggcgaccggctctttgccgccgtggggcaggcgtgcggttgatgtgctcattgtgtcctttccttgatttccggtacccggatgcggccggatgcgtggcggatgagctgcggccgcgggaccgggacggccgtcgtctcggctaccggcgttcggcatcgtcctgtatcagcgccaacgcacgtcgcagcgtgcgcaccgtgatgtcgcattcccgtgcggtgccagccgactgcccgttgggttcgttgagtagatgacaccgttctcagcacaggagcggcaggtgatgccgatccggcacgtcaccccgtaaagcccggcatacagggtacatacaccaggcaaaacacgcccggcagaatggtcataccggctcgataccatatctgccatacttacccaccatcaaacatcacaggagatctcatgaccacgctagccattgatatcggaggaaccaaaatcgccgcagccgtatgcgatgaaaacgatgccatcacacatcgctggcgcgttcccacaccgatggacgccgacgccatcaaccaccacatcgccaacatctaccatgaggccgtcgccgccggccacgacgacatccaggccatcggcatctccgcggccggcaacgtcggcgcggaccgccgcaccctcaccttcgccgcgaacatccccgcgtggatcaactacgacctgtccgagcacatcggcgcgctcatcgaccatgccgtgccggtcgtcgtcgagaacgacgccaactgcgccggctggggcgaatacgtgcacggtgcgggccagggcagctcgaacatggtcgcgctgaccgtaggtaccggactgggcggagcaatcgtcatcgacgggcggctgtaccgcggatcgttcggcatggccgcggaactcggacacctgccgatggtgccggacggcgacacctgcggatgcgggcttcgcggctgcgcggaacgctacacgtctggaagcgcgctggaacggttcgccaagtccgccgtgcgccgacgcccgcaggacgccgaacgcctgatggagttgtgcggcggcgacgtcgacaagctcgaaggcccgatggtctcgcaggccgcacaggagggcgacgtgctcggcctgtacgccttcggcaaaatcggcgaatggctcggccgcgcgatggccgccaccgccgcggtgctcgacccggacgtcttcgtgatcggcggtggcgtagtggcggtcggcgacatcctgctggagccggcgcgatacaactaccagcggttcctggagggcagcgcataccgtggccacgcgagcatcgtcgccgccaccgccgggcaggacgccggcctgatcggcgccgccaacctggcactgcgctaagacgcgcgatgagagatgacgatcagacgcaatcgcgacgcgtgcaacatcccaacatgaaccgcacgcgggcttacgggttctgatacgtgcacaactcccgcgaaacggcataatgcacgcgttgtccaacgccagacgtgtacaacagtgcatggcaacgatttcatccactgttgtacaccgaccgcaattccagaaacgttggaattccaacaagacacacatctacatgcataggtctcccaaggcgcctcgtgcacaactgccgcattcgcccgatatgcgcacgttgtacacgaggtccccttcgaaacgacctccgaaacgacctccggaccgaatcacgtccctttcatctccacctctcgcatgaagccgaacgcggtgcctgccgttatgcgagatttgcaccggacacggatcacagatcccgtttaccttgaccgacaacggccgacgccctaagacaatgcgcgttcgcggtgggaaatgccacgaaatgtcgaaaacgtgggttcttgccggttcgtggcatgaaatatccgacttgtctcattgcttgaaacaaaggataccgaatactagacaagtcagtaattgggcctcccatgcagttctattcgcgtcccggaaaaatcttgcacgatacaacgagaaaattgccgaatcaccagcagcgttcgagcatcgccgtatcctccctcgccccgccctccggcccagccgcatcacagcatgtggtagtcttgctgttgttcatattgggcggcattccgatatgccaggaaagccgcgttgcaaaggtagtaccgttttgatttctcgatgagcgtcgccgagtggcttcatgagcgaagccgtgcctcggcgtacgcgatcgcaactcacaccaatcacagatccgcaaaccgcatcggcgagattgcgccgatccggtttctgcatccgcgctttatgtgagttttcccccatttcatcgagaacaaggaacccaatgatacctgcactgaccctgacgaacatcgttttcacttatccgggcacatcggagccgctgcttgacggcatcgacgtcactttcgcacgcggatggaccgccgtgctcggcgacaacggcatcggcaagacgacgctggccaagctcgcgatcggccggctctcgccagatgccgggcgcatatcgccgaatccgaaccgcctgcataccggttactgcccacaaaacaccgacgaaacaccggagaatctggaggacttcgcctgcgactggtcaccgcaagccatggagatacgccgtgaactgggcatcggcgacgactggccttggcggcccggcaccctgtcggacggcgaggcgaaacgcctgcagatcgcatgtgcgttggcgaccgatcccgacgtgctggtgctggacgagccgacgaaccacgtagaccggccgacccgcgagcgcatcatcgcggcattgcgctcgtatgacggcatcggcatcctcgtctcgcacgacgtggccttgattgacgcggcggcgagcagctgcgcgttgttcgaacgagatcacgtgcgcggtcataacatcaccgtggtgcgcgtgcggccgggaaactactccgcggcatccatggatgcgcaacgggagcgggcagcggcggcaggcatggcgcgcgacgcccggcgcgaatccacgcgcatcgacgcggtcaaggagcagcgccgacgggcggcgacgagcgagatagccggcgcatccaaagcgcatcggctcgtgaatccgaaagaccatgacgcgcgcagtcgcatcaagaaaagccataaccccagccgactcggccccgcgagcgcccgcatcgacgcacaggcggccgccgcccgggaacgggccgcagccgtcgtcaccgccacgaagcgctatgacggagacatctggatggatgccgaatcaagcaaccgacgggagcttgtgcggctggagccccagatcatcccgtacgcgccgcaatcgccggatggagtcggcgcggcagcgatatcggagacagcgggcctgaagataccgatgctgaccgtcggaccgcatgaccggatcggcatcagcgggccgaacggcaccggcaagaccacgctggtccgcacgctgctgcgcacgatcgcgatgcgggagcagtattccggcatcccgctcccccggctgacgatcacgcagaacacgacggatcaggatgcccgggaggcgatgcgccggctcacggcgttgacgcccaccgaccgcggtgatgtattgtcggcattcgcgcagctcaacgtcgacccaagccgcctcctcgccggtggcaacccgtcgccgggcgaattgcgcaagctgctgctgtgcttgggattgcgagatcacccgcatctgatcgtgatggacgagccgaccaaccatctggatctgcattcgattcaggcgctggcccacgcgctggccggataccccggcgcactgctgctcgtctctcacgacgagggattcctggagtgcaccgcatccatccgctggacgctgcattcggacggcctcggcggcgcgcaactaacggtcagttgacgccaccatgaccagcgtcttggccttgacccatctgagcaggaagccgacgtatggcagcgccacgccgatggccagcatatagccgacgaccatccattgggcggtgccggatgacacggagaactcgtccaccagatcgggcagcgcgatgttcatcgatgtttccgacagcatgcccaggaacgcgccgatgtacagtcccagcatcaccttgtgcggatgcctgaatttcggggattcggcgggaatatcatgtgcggagccgtgttctgcggccgcgtgttcttgcagggttgtttctttcgaagttgtctggatcgcggacaacatgacctctcttgtactcttcccgtccccatcgagcgagcggcgcgcacggccgggccctgcgtacacgtcgagaagtccctaacgtccggacctgcgacggcaacgaaaaaccgcatgactggcatcgggcgagccgattcgacgaatgtcatgcggttttgaaacagccgtcaccgtagcacgatttgcaaatccgcataagtcgcatccgcgtatcgtgcgcgtatcatgctggtagaggacgcggcgaatcctcgctcgcgccagaccgagcgacgacaggaaagggagaccatgcagcatttcacccaggtcatcgacggcatcgacagctcgcaggccgaactcgtcggctatgtgatcgacaacagcccggagatggacccggaccggcgccggccggcgatcctgatcattcccggcggcgggtacgctatcggatccgaccgcgaatccgaaccggtcgcgctgcaattcctcgcggccggatatcaggcgttcgtattgaaatactcctgcgtgccaagccggtacccggtggcgttgctggagatggccgaggcgatgtcgatgattcgcgggcatgccgacgaatggcatgtggatgccgggcgcgtggcggccatcgggttttcggccggtggtcatctcgccgcgaacctgacgacggtttccagcgatgccgagctgcgcgacgccggatatgatccggctgccgtgcgcccggacgcgctgctgttgtgctatccggtaatcacgtctggccggttcgcgcaccgcggcagtttcgacaacctgctgggtgacggcaaagacgatgcgtcgctgctggagctgctgtcgatcgagaagcatgtcgacgcgaccatgccgccggtgttcatctggcacaccatcaccgatcaggccgttcctgtggagaattcactgctgatgatccaggcgtgccgtgacgccggggtcagcgtcgaagcgcacctgttcccgcagggcgggcatggactgtcgctcgccaccgtggacaccgcacgcgccggctcgccgggcgagggcgacctcaacaacgtcgtgccggccgtgcagatctggccgcggctcgccttcgactggctccgccgcacgttcgacgcgaggtaaaggctgctgtcggaggttcaccggcccattcgcgcatatcccgcgcctgtgccttggctgtgcgccgtcaccgtgcgtgggttattgcgtcactgtgcgagggtaccgtcaccgtgcgcgccctcacgcacagtgacgcatcaagaaaatccctgttttccaatgctttccgggtaccgtcacgctgcgtgtgccctcgcagcgtgacggtacccgcgcacagtgacgccgcggaacagcccattggcagcaaccacggccggcaacttggcagtgtcactcaccggcagcttgacgccgcgcgttccgcggctcaggcttggcgtggatcttcgcggtgagatggcgcacttcgatcttccataccgtgacgctgcgcacctgctgatcggtgaactcgatatccggcatgcccgcctgctgccccatcagcagccgcagccctttgcggcactcgtccaggtcgtcgatcacgctggccacgccgttgccgatcaccgacttgaacgcctcgccccagttgcacggggtgcggccggcgatgacctcacaatcagtctccatcgagaacgccacatccaacgcgtttcccgcagcccggatcgcgtcgagtttgcggccgatcgacgccgagtggatgtacagggtcaatccggccagttcgtcgccggtgccggctccctcgcgccgctgccattcgtatccgaaattcagcggcacgatcgtcagtccctcggcatccgcatagcccacatgcacgatacggcatgcggcgatgattccctcgatctgttcgcaatcggtcacctcgcgatcggcgcggcgcatcatgcgatggcaccctgcgaccgtgcgctcgttattgcgtcgcgtcggacgcgcttcatccagtcccgtcatcgccatcgctccttgtgccgccccgggtttgatttgatgatactcccgttccatgacccgtaattgaagatgggatcagccgcaatgcggagaaaaagctgagcgaaaaagaaaaagcgaccccggccggacttgaaccggtgacctccgccgtgacagggcggcgctctaaccaactgagctacggggccgttcgtgccgtcatcaggcacaagagaatataatacaggactactcgaccatgggcgtgtcgcggccaagcgcccgataaagaccggtcgcacacggcaaccggtcaatgcccggccgggcgagcgcacagtacggccacaaatgcgccttggtaacggctatgaactcccggatgaacgccgtgggccagtagtagccacgcgtatggctgccgcccccatccgccttcagcccgatatgatgcgcgtattcgctggctcggaacacatggtaatcgctggcgaccagcgcgcaacggtaggcgaggccccggcgcccggggaccgattgcacgccgctgcgcgcatccatgatctccttcgaaaaacgaagattctccatggtcgtggtggaacggtcctccatgagcaccgcgtcggcgggaacatggcggctttccgtcaggtaccgccgcatcgattcggcttcggacaccacttcgtcgctcccctgtccgccggaggcgacgaacacgcccgtcttgccctgcttctcccacaatggccgccgccagcagcgccgccaacgacgccaacgtcatgccgaaattcattccggtcttccccaccagtcatcgtcttctcgacgatgcgctgagacccgtcactataccgcggaacctgcggccgtaccacttacgccggcagccatccaccaccgtctcttcccccggcatgtgcgatgccctataatcgtagatttgccctattcacacgcctcgggcacaccgccgcgacctcatgcgtgtacagtacaggaaggatttccatatggaaccgaattatctcgtgttgctgggaatcgtcatcgtgatcatagagttcgccctcaagctcgatgcgatcctgatcatcatcgtgtccgccgtggcgactgcgctcgtcggcggcatcattcccaagggcaacgtcacgatcggcatcatcgtgttcggcgtgggcatgatgctgttcacgatgatcatgggcaacgcgttcgccgcgatcaccgtgatgaccgtgggcatcggcgcgccattcgtgctcgcctatggcggccaacttcaacatcgtgcccgttgcgatgctcgacatgaaggaccgcatgggcgtgatcaagaagcaggtgctgccggcgatggtgatgatcttcgtgcagatcgtgtacatgctcatcgcccagtgacaccgtattccatccgtatatttcaagcaaaggagccattatgagcaagatcctggtcaccggattcgatccgttcggcggcgagccggtcaatcccgcattcgaagcggtcaagctgctgcccgagtccatcgcgggcgtgagcgtcgtcaaattggagattccgaccgtgttcacgcgcagcgccatggtggtcgaggaggccatcgaacgcgagaagcccgattacgtgctgtgcatcggtcaggccggaggccgttcggccgtgaccgtggagaaggtcgcgatcaatctggccgaagcccgcatccccgacaacgacggcgagcagccgttcgacaccccgctgcgcgaggacggcgacaccgcgtatttcgccacgctgccggtcaaggccatggtcaagcgcatcaacgcgagcggcatcccggcgctcatgtcgtacacggctggcacctacgtgtgcaacagcatcatgtacaacgtgctgtacctgctcgaccgcaggttccccggagtcaagggcggcttcatccacgtgccgtacgcgaccgcgcagggcgtgggcaagccgagcggcacgcccaccatggaaatcgcgacaatggccaaggccatcgaggccgcgatcgaagccgcagtgagcgtcgatgaggatgccaccgacatcatgggcgaaacccactaatcacgcccacccgtcgaaaaccactgacatatcagcccgccgacgagcccgctcatgggttcgtcggcacactgcagacggaccgaatcacttatcgggaagccggccgtcgggatcgcacacgatccattcgccgctgggatccacggcgaccgtcgggtgaggaaacacctggtcgaacaggtccgcgtcctcgatgacccgttccgaggtcttgtacgggacaggcctggcaccggccagacgtatgcgcgcattatcgacctcaaatcgtcccacggccatatggtcgccttctcgcgatggccactcgaacgagccgtgaaatcacgatgcgcaatatccaaataccggcgctctctccggggatgaacgggcagatgatgaacgtggcgaccccgccgcactcccatgagatttctcgcgcagccatactgattccgcggggccgcgcttgcgttccaaccactccgattccatacgaccattacctatcctgacggccattatttcccctgattggggcgccacgccccactccagcccttccgataccatggtatgcggtggtttggcatgcccgcgaccgacatgcggacgggcaccgcatggaacggccggcatgcgcggaccaaaagcacagaccagaaaacggcggaatcccaacccctttaaggagtaactgcataccatggcagagtttattgttcagatgggtcagccttcgtgatcgttgctatttcaacgtttccttggcgtgtccgctgacacaaaagtgtgtcaggaaccaacccggtggttcccgagcgttttgtgtcaagactgtgtcacctgttgtgtcatcaatcagtcggattccattcagatgatcatgcaattcactgcgttcggaacggatgacactagacacatgtcctggcccgtagctccgttgattcacgtcaacaccgtaagcatcaatgcatacctatcccattcagccacgggcacagcctactcaacagaccaatccccgaaccaacggcgaaaccgaaacaagcttcaatcaaaatcagaaacctcatcgtttcaccccagaccagaaaccatcgttggctcacccgtgaccatcaccgcctcccttgaatccagagaacggattgacatcatcacacaagaccagtaaactaggcttgctttctcttagcaataaggaaggctccaagccgccgggggtattcccccggcacttctttttcatccggggaggccggcgatgcgcgagttgagcatcatggtcgacgagtccggcgaatggggcaaactctccaagtactatctcatcacgctcgtgttccatgaccagtcagaaccggtcatgccccacatcgaacgctatgagcaacacctcgcggatgcctcactgccagacattcccttccacgcaggaccattgctcaacgggcacgccgactacgagaccctcagcatggccgaccgcaagcgcctgttcgtcgcgttcttcaccctcgcacggaatctgcccttcacctacgtgacgttcgcacaccgcaaaagcgagttcgacaacgacaaacgtcgtttcgaggctcagctgcggcgagacctggcgaactatctgctgacacacctcgacagattccagtcgtacgacaccatcaagatctattacgacaacggacagcaggtcgttaccaacgcgttgaaggcatccatcggctatgcactctccaaggaagcggtcatctaccgcaaagccgaccctaaagactaccgcctcgaacaagcagccgatctcatgtgcgccatcgaattgaccgcgctgaaattcaaagccggagaaaacaccgaaaccgatcacaaaatgttcggagactggcgctcattcaaacagaactacctcaaagcgttacgccgcaaacaagcaaaataaccgccatctcccgcatcgtttccaacagacgcttgcataaaaacactcagcccgcatacgacgaaagggtgggcatgccatgaaaggacatgcccacccctgatgtcagtggttcggcaaaccggctacgtgtttagcagcggatcctcctcaccgctgtaaaaccggcacccagcacggccagggcgaccagcgcaccggccacgaccgcacgtcaacgccggtcttgtccaacccctgcttcttgccatcgttcttggaatcggccttcctgtcacttgcagacggcctggttgcagccggtttgttgctgtcggacggcttgcccttcgcctcatccttcaggttatcgatgtacacgcgggcggttttgcccggctcgaccttgccaccggcaacctcagccttcacgtcagtcttatcaggcaacgtctcagcaggcttcgcagccgcgacggacttcgtcgtgaaatcggggacgaacttcaacgcgttctcgttgtcctccacccaatggctcaccttggtattggaatccttgtagatgggctgcgcgtacagcgcgacttgccggatatccaccggggtcttcacatgcacgccattacgcagcaattcgttcgacgtgtcctgaacgacttcctgataggggtacgaaggaaaatcagagccctttgcgttgttcgtatacgcggtgttgggagtcaagccaatcaatgggaaatcaaaactgccggaggccttgccattccaggagtcctcgttgacccacctggcgaaccattggtcagaggccttgaaagccaccttgctcccatcagtcgataggtcattgtcgttaaagacgcccttgtactccttatcgccatggaagccatagatgctgtcgtacgagcctgcggtcagctcatcatcggaaacgcccgtgctgcatatgggaatccagtacccccgatggtattcgcacttgagtgcgccttctctatcggggtgatgtcggtgatacgctgcacctcgatagagaagcacacgtccttgatctcgtccacctgcgcagggtcgatcttgtagtcgaacgacacgttcgccgtctgcgctcccacatctgacaccctcacgttggacaacgtgatcggattgtccttattcgttacatccgccgcgttcgcagtggcgacgcccccgaacaatgtgcatgcggccacggccaacgccgccatggcctttccgaaacgcctcatgacattcccccccccgtggactcattctggcggcgtcgggacacgccgcatgcgcgcgttcgcgctgttgcgccatgacgatggcgtatgggataatccacaaggtgcttttgcgtggaccggaacggccgtggcgacacggaaacgaccgggcggatgacacgaatgactgccgttcgggacaccccccgaaaccggttgtgtcattaccggatcagggtcccgcaaaacgttggaacttcaacgtttagtgaatggttaggtattatatggcagaattcgtatatcagatgatcaaggctcgcaaggcgtacggcgaccgtgtgatcctcgacaacgtgaccctgagcttcctgccgggcgcgaagatcggcgtggtcggcccgaacggcatgggcaagtcgacgctgctgaagatcatggccggactggagaccgtcagcaatggcgaggcctacatcacaccgggcttcacggtcggcatccttcagcaggagccgccgctggacgacaccaagaccgtgggcgagaacattaagatggcgttcggaccgatcgccgagaaggtcgcgcgtttcaacgccatcggcgaggagatggccaacccggacgccgatttcgacgcgctgatggacgagatgggcaagctgcagaccgagatcgacgcggccaacggctgggatctcgactcacagctcgaacaggccatggacgcgctgcagtgccccgacatggacaccccggtctccgtgtgctccggtggcgagcgtcgccgtgtggcgttgtgcaagctgctgctcgaagcccccgacctgctgctgctcgacgagcccaccaaccacctcgacgctgagtcgattctgtggctggagcagttcctgcaccagtacaagggcgccgtcatcgccgtcacccacgaccgttacttcatggacaacgtggccgaatggatctgcgaggtcgaccgcggccacctgtacccgtacaagggcaactactccacgtacctggagacgaaggcgaagcgtctggagatccaaggcgccaaggacgccaagctcgccaagcgcctcaagaacgagctcgaatgggtgcgcagctcgcccaaggcccgtcaggccaagaacaaggcgcgtctggagcgttacgaccagatggagaacgaggcgcgcaacaacaagaagctcgacttctccgagatccagattccggccggcccgcgtctgggctccgtggtgctggaggccgagcacctgcacaaggctttcggcgaccgcgtgctcatcgacgacctgtccttcacgctgccgcgcaacggcatcgtcggcgtgataggtccgaacggcgtcggcaagtccacactgttcaagaccatcgtcggtctggagccgctgacatccggcgagctgaagatcggcgacaccgtgaagatcagctatgtcgaccagaaccgtgaaggcctcgacccgaacaagaacctgtgggaggctgtctccggcggactcgacttcatcgaggtggccggcgtcgaagtgccaacccgcgcctatgtggcgagcttcggattcaagggctccgaccagcagaagctgaccggcgtactctccggcggtgagcgcaaccgactgaacctggccctgaccctgaagcagggcggtaacctgctgctgctcgacgagcccaccaacgatctggacgtcgagacgctggaatcccttgaaaacgcgctgctcggcttccccggctgcgccgtggtcatctcccacgatcgttggttcctcgaccgcatcgccacgcacatcctggcgtgggagggcgatgacgagaacccggccaagtggtactggttcgaaggcaacttccaggcctaccaggagaatcgtgtcgcccgcctcggcgaggacgcggcacgcccgcaccgcctgcacaagaagctgacccgcgtgtgacacttgattaagtcatgaagaagcccccgcaagggggcttctcgcgttttcggcccctcgccaaatatcctcccgctggcgggaggtgacgcgcagcgccgggggggggggcgagaccatggcgcataacatatacgaggaggcccctcacggttggtgaggggcctcctgtggctattgatcggtcagaaccgatcagcgtcagcggacgctgcggcgacgaaccgcgacgaccgcaccgccggccagcgcgaacagagccgcgatggtggcgagcaccgccgtgtcggcgccggtggcgctgagcttgccgtcgttcggcttcgtggtcggcttcgtggtcggcttctccgtacccggtttggtcggctcggtcgggccagtcgggccgggcacctcagagtcctcggtgacggtgacggtcacagaggcggacttgccgttcgccgtggtcgcggtcaccttcgccacgcccttcgcgacggcggtcaccttgccggtcttgtcgaccgtcacgaccttgtcatcgctggaggcccacgtcaccgcctggtccgcgtcatccggcgcgaccttcgcggtcagctgcgcggtggtgcccttcttcagcgacagcgcgccattggcaacaccatcgccagaaacggtcacacccgtagcctccggagtctccgtcacctcggggttgtccttcggctgctcgggctcggtgagctcgaccggagtggccttggccgtcgcagccagctcggcgacagccgcccaggtgacgcctgcgctggtttcggtgaggccccatgcgtcgttgatctggaacttgacgtacacgtcaccggacggaatggtattcggcagcgcgatggtctgcagttccttggtgtacgggaactcagccgtggcgacgggttcaccccagttggtgacatcggcaacgctgttggcgtcgctggccgccaccacgtacactgcgacattcttggccgggccgttcagcttgtcctgacggtacaggtgggtgatggccgcaatcttgttgccctcgccgggcgacgccttgaacgccagccagtgcggaagattggcgctggggttggagtacttgctgtgccagaacgtgtttgcgttcttgtcgaaggcgttgcccacgggagcatgctcgccggtggtctcctgagagctcgccgcgtagtcgcttgcttccacgtccttggtcaggctgccggtcagcgccacgctggtggtgccgagctcttcaccggtcttggtgttggtgagcttgaactgcacggtggcgtcgcccgtcccagtggtgttgaccacgttgaagtaggcgatggcggccttgccggccggaatcgacttgaggctgacgcttccgggcttgatctcccagccttccggcacgaccggggtgacggtgacgtcaccggtgttcgcgttggatgcggccctcaccttgacggtgatcttggacggggaggccgggttcacggtcttggagtccacggtggcggacatgcccatgtggccggtgagcgtgaacagcgcgttgtcgctgaccaggtcagccgggaactgagcgacggtgccagcggcgggacgatgggtctccagatcgatgttctgctcgttgccggtggcgatggcgagacgctgctgcgtcagcgccggggagatggtgtacttgccatccttgtcggcgcggatctgccacttctgcgtgttacgctcattggcggtgtcgcgctgatcctgaccgacggacacgtcggcgcagttgcgcagttccggcgtcgcgccgacctgggtgacgacatcgagatgcttgcttccggtgaagagcgcaagacactttccggacactgtatccttcatctggtagtagccgtcaggcgtggtgatgagctcccacggacctttggagatcgacttcaactgggggatgtcgtagatgccggcatcgaccggggtgtagtcgtattcgcggatgtccagcgggtagccgatcttgtcgatgtccgccttcatatcgttccacgtcgcccacgggcgggaatcggaccaggtcatctgtgagatgaagcgcatgccgtcgaagatctccttctcgacctcgttctcggtctggtagatcgagctgtcgggccagatggacaccttcgcaccggtcagtttgtcgtagttcttgtcgatctgtcgtccgccgtcaaaggttccgacgttccagttgttgttgtacagtcttgcggcgttgaccttgtacacttgcgccgaacgggaccagtacagggcctgggtcgcgttcatcaacgtgtatccgtcctggacgagctcctgcggcttgcggccggcaccataccagtattcgatgacgatgtccttgttcagggagacgttcttggtgttgacgatgccgtcgttccagatgcgcagctgcttgcccttggccttgacgtatttatctatgtcgttgatgaagccggtgaacgcatcattcggtgtcgcgccggctccgtactgcttttcggcgaacgtcttcaacttgctgtagttgtcgaagctggtgccgatcatgtactcgtcggcgcccatgtgccagtatttcgtggtgaatacgccgtcgtattcgtcaatcagcgtcttgtagaacttcacggcctccgggttggagatgtcgagcttgttgggatccttccggcctgagttgtcggcaagctggtactccgggtagttctccagccagatgttcatgtggcccggggagttaatctccggaatcacgtcgatgccgtagctattcgccttcttgacgaacttcttgacgtcgtcgcgcgtgtagtacgaccatgtggcggccttcttggtgttgtcctcttccggcttgagcttcatctccagcagcacgtagttgaggcgcaggtcggccatgtccgacaggaaacggtcgatccagtcagtggagatgttgatctggcaggcgcacagcgtagcgccgcgctccttgtacttcggcttcgtggcgaccgtgccggcgggcagggtcagctggccctggcgcagcatctgcgagacggaacgggtgccgtagaacacgccgatgtcggtcgcgccgatgacctcaaggcccttcgagccgatggacagcttgaatccctcatcacccagttcggccttcttcgatgcatccaacgtgagcgagatgtctttgcccgtcgctgaaccggtcgcggccttgatgtccacgtcggtgaacttggtcagctcggatgccaggctctgcgcacgcgcggccagtgcatcgctcgacacgacgcgggtgccttcacccagcgtccatgcgccggtgccgtcggtccagccgtccatgctcgggacggtggccgggcgggtgagattcacgggagccgtggcactgtacccggctgcactatcgtcggcggcgctggccgtcatcgcggtgcacatgccaccgaccatcaggccggctacaatggccgcaacggtacgcacaccgaaacgtctattggagcttttctccattgaaacttcctttattctcttgttgcggttatgacaggagagcttcatcgtctccaatggatgccgagccggcaaagcaagacaaagccgtcacaacatcatcaccgattaaacgtacactgtgttaacaaaattagcaagatgcatgaatgtcgccttgcgttccagccttttccacgcccggcacccatattccacgtcacatcgcgttcatcatcggcttacgctcgttacaaaaccggccgaccgaatttacctggtcacgctacactgctgtgagtaccgaaaccggctgggagccgagcgaaagcatgaacatataaacggaccgtatatataccgcatgatatacgtcccggcacgtcactggaagggagcggcaatgacgcacgaagacggaacgacaccgttgaatcatctggtaaaggtattgagactgggcgacccttccgaataccgcggacatacctacatcagcggggagagcctgtacttccccaccggacgcgtgtacggcgggcaggtgatcgcgcagtcgctgatcgccgcgtcgaagacagtctcgcccagccggctcccccattcggtgcacgggtatttcatcgcggcgggcgatatacgccaggatttgctgttcgacgtggagaccctgcgggacggccggtcgttctcggcgcgcagggtcaacgtgacgcagtccgaagggccgatcctgaccgccatcgcaagcttccaggaacaggggcagtccggagtggagttctccgatacgatgccgcaggacgtgccggcacccgaaacgctcaccagtgccaaggagctgatggaaccatatgccgacaaatcgccgttcgccaagttctatgcaaagaagtcgccgttcgacatccgccacgtcacgccgaccatcatgctcggcgccgacaaggacagcgcggcgcacgactcaggcaagcagctggtgtggatgaaggccgacggcgtggtggacgtgccgcaggtaatgcatcgggcgatgctggcgctcggctgcgatcaggtgatgatggaaccggtgctgcgcagggcggggctgagcatctcgacgcctggcatctcgtacgcgtcgatcgaccattcgatgtggtggtatcgcgacgtggacatcaaccagtggcacctgtacgtgcaagatacgccgaccgccgcgcacgggcgtggactgggcgtggccaaagtgtacacgcaggacggcgagctcgtcgccgcgatggcgcaggaggccatgatccgcgtgccacagcagtgaggccacggacgatgagtgcggcgggtattgaggctggggctgagactggttcggtgccgggaattgcggctgcggccggtatcccggttgcggctggtactgaggctggaccgtcgttggtgtgccattttgaactgccggaccggtctgggcagccgggccagacaccggtacggcattctcgaccttggttccacatttcgcgcagaatctggcacctgcttcaagtgcactgcccacagtgcatgcagaacttcatgcttttccctctcggatacggcccatcacagaatgtgcgttccgatcagcggaaccgcggattccatgctctctccatggcgatcctattcctgcacctgcgaaacccccgtttatcgcggacgggggtgttcacctattgaaggggcacggagattgccggtgatcagagtgcgggatccgtggtcctgattggcaccggaccaccctcagccgctacgcggcacctcccgccagcgggaaggggcttagtggcgggttttggcggtggcggaggcgatgccgcggcggcgtttggcggccttcatcttggggttctccgggccctccatgggcggcagctggcacagccattcgccgacgataccgatcaccatgtccgccaggcatatcacagcggcgacggcgcattgcgtcacggccgtcgcatagtaatccgcctcgatatgatcgagtaccagcagaatctgcccgacataccagccggccagcgcagcgccggtcagccccagcgccttcgacagcataagcgtgtacacggccttggtcgggtcgagcggcttgagtcgggcccgcttctgcggatcggtggtggcgtactgatgcacctgcagcgccatcaccagcacgacaatgcccagcaacaggagcaccacggacacgaaccatggcgcccccaacaacgaaagccccgaggactcactgacctgcacaagcagacagcccgcgatcagaccgagcagcagcgcgacgacatactgccaccatggggtgcgacgtatcttcattccgtactccctacgatccaagtgtcggacagcagtcccacacggtcggcgtcgggtgccatggccagcagatacgacaccgggtcgccgccgagccgcgcctgcgggtccatgtccatccacggtgcgagcaccgaagcatgggtgcgggctgacggccacggcacccggcagtccggctcatcgcagaccgttcccggcatatccaccagatcgaggtcgacatccccgttcaacgactcctcgacggaaccgagcgtggcaatcagcgccttcgcgtccatccggcacgtcatttgcatgacagccgacatggcatccgacccatgcagatggctcacatgatacagcggtgagatgccctcgacctgatcaccgggaatgccctccaatgcgacaatcgccgtgcggaacagggtttcggcctcgttactgcggctgtccatcgagatgacggccgtatgtatggccggttgaacggtagcggtatcgccgtcgcccggtttccgcgccgaaccgtcgacggttccatcgaattgcggtatgtcggctgcgctgccggacggctgcaccggggcatcgtcggccatgccggtcatccaactgtcgtcgatgcgatgtacgtcctcgcggtcaccggcctcgtgcagcaaatcggcaatctctcccccgtgcgggcccgcgagccgggcggccggatcaagagccagccacggtgccaaaacgaacgcccgctgccacgcacgcggatgcggcaaagtcacattcgggtcctcgctgacgaggccatcgacatcgatgatgtcaagatccagtgtgcgcgacgcccaatgttgttcccgcgtgcgtccatgagcaacttcgatatgctgcaggcggccaagcagactcgccgcgtccagctcggtcgtgacctcgatgacagcgttgagaaaatccggggtaccatccggcatgccccatgcggcggtgcggtacaacggcgatatcccagtcacctgtgtgccttcaaggccgtcgatatccgcgatcgcggaccgcatcgacgccgcgacgtcgcccttgttgccaccgagtgcgatcacggcgtggtgcatgggcgtgacacggccttcatcagctcgaccagttttgccgtccgtattccgtccgctccgccatcgctcgatggtgacgctcacgtcggcgaacggcacggtgatcggagctttgggcttatgcacggtgacggttacgccttggaccgcgggatggtcggctatcacggcgtcagcgatgagagccgccagccgctcaatcaagtcgacatgctcgccttcgatgacggatacgatccgtttggcgacgcgcccgtaatcaaccgtgtcatgcaggtcatcgctggaaccggcacgtgacaggtcgagatgcagcacggcatcgacgatgaagggctgcgtgcgctggtgctcgtagtccagcacgccgtgcgtgcccatgccttgaacgccggtgaggcgaatcgtgtccacggttgcgtcctttcgtttaggttggtggtgggtgaccaccccagtcagcttcgccgacgggcctccggctgagggaggaggattagttttggtattgtcgccagagggagccgattgtcagggcggcgcggctgcggcgcacgtcatgcacgcgaaccgcccaggcgccgtgttccgcgcacagggccgacaatgcggcggtggcattgtcacggtcgtccatcgtcggctcgccgatgccggcatcgttcaacgccgccgaaacgaaccgctttcgggaggctccgatcagcaccggatatcccgaccgcttgaacagatccagtccgacgagcagcggcagattatgctcgatgccgggcttggagaatcccagaccggggtcgatgatgacccgctccggggcgacaccggccttgagcaccgcatcgacctgagacatcagctcgtcatacacgtccttgagcacgtcgtgttcgtagtgcgaggtgtcggcgtccggctcggtgccgcctttcgacccggccagccagccacgccaatgctgtacgatgtacaggcagtcatggtcggccaccacgtgcggcagatctcggtccagtcgtccgccggacacgtcgttgatgatctgcgcgccctcatccagcgcggcctgcgccacggcagagcgtgtggtgtcgatggagacgaccgctccgtgggcgatcagcgccttcgcggcaccggtcacacggtcgagctcgtccttctcgctgacgcgcttggcgccggggcgcgtcgattccgcgccgatgtcgatgatgtcggctcccgcatgcagcatgtcgtcgccgtggtcgcgggccttgcccggatccagccacaggccaccatccgaaaccgagtcctcggtgatgttgagcacgcccatcagcagcgtgcagtcggtatcatgcaaccgctgcagttcagtcatgaattctcctatccgtcaatcgccgaaacggcggcgatgccgaccagtcacggcgatgagccggctcagtgcttggccatgatcagactcatcgcctcggcacgggtggccggggtgcgcatcacgccgcggaccgccgatgtgatggttcgcgacgcgggcttgttcacgccccgcatcgccatgcacatgtgctcgcattcggtcacgacgatgacgcccttggcgtccgcgtattccatcagcgcgtccgcgacctgctgggtgatgcgttcctgcacctgcgggcgacgcgcgtacagctccaccagtcgggcgagcttgctcaatccgacgacctgcccgttggacgggatgtagccgacatgcgcgacgccgtggaacggcagcagatgatgctcgcacaccgagaacagctcgatgtcgcgcaccagcaccatttcatcggtctcgaccgggaaacgcttggacagcacctcctgcgggctgcgtccgagccctgagaaaatctcctcgcaggcacgtgcgatacggtcaggcgtctccagcagaccctcgcgatcgggattctcgccgatcgaagtcaggaacagccgtacggccttgcgcacgccctcttcgtcaatcgccatatatcctccagtttccctcaccacttatatagtcgtcatgcccgccgaaccggggcaggcacaccgtttgccgtcaaacggcaaacacccgtgcgcccggcgagcccctttgcgggaccgtcgggcgcacgggcacgaaatcaccgctcccccggcttcatgccgacggaacgtttgagcgactccggaatctccaccggaggcttgtcggaatcgggacggcgctggtcggacagccacaccggacgttccggagccttcctgatgttcgcgaagatcgcggccagttccttctcattcagcgtctccttgacgagcagctggcgaaccagctcatcgagcacatcgcggttgtcgttgatgatgttccatgcctcggtgtgcgcggtctcgacaaggccgagcacctcctcgtcgatgacctcggcggtgcgctcggagtacttgtgcggcgcaagaccatcgaaatcggcgctctggtcgtcggtgtcggcccacttgatggcgccgagcttcgaggagaagccatattccacgaccatggtgcgggcgatcttcgtcgccttctcgatgtcgttcgacgcgcccgtggtcggatcgtggaacacgacctcctccgcggtgcgtccgcccatcgcgtacgccatctggtcgagcagctcgttgcgcgactgcgagtaacggtcggtggtcggcatgaccgcggtgtagccgagcgcacggccacgcggcagaatcgtcaccttggtcaccggatcggtgttgtgcagcgcggcggcgaccagtgcatggccgccctcgtggtatgcggtgttgcgcagctcattgagggccatgcccttcgactgacgcttcgggccggcctggacgcggtcgatggcctcgtcgatggcacggttgtcgatcagctgtgcgccggcacgggcgcacagcagcgtggcctcgttgagcacgttggccagatcggcgccggtgaagcccggcgtgcgcacggcgaccatgtgcagatcgacgtccggcacgaacggcttgcctttggcatgcaccttgaggatggcctcgcggccttcgaggtccggcgcctccaccgacacctgacggtcgaagcggccggggcgcagcaatgccgggtcgagcacgtcggggcgattggtcgcggcgatgatgatcaggttggtgtcgctgtcgaagccatccatctcgacgagcagctggttcagcgtctgctcgcgctcgtcgtgaccaccactcatgccggaaccacgcttgcgtccgacggcgtcgatctcgtcgatgaagatgatggccggggcgtttttcttcgcctcatcgaacaggtcacggacgcgggaggcgccaaggccgacgaacatctcgacgaagtcggagcccgccatcgcatagaacggcacacccgcctcgcctgcgatcgcacgggcgagcagcgtcttaccggttccgggaggaccgtacagcagcacgccgcgcgggatgcgggcgcccagggccttgtacttcgacggatccttgaggaagtccttgatctcctcgacctcctgcacggcggagtcctcgccagccacatcggagaacttggtggacggcgtctggccttcgagcagcttgccgttgttcttcttgccgcccatgccgaacatgccggacgcgccgcccatgcggctcatcaggaaccagaacacggcgatcatgatgatgaacggcaatatcgagctgatcaggtagctgaccatgctggtctgctgcatgttagaggtccaccccttggaggggtcggccttctcgaccgcctgcacgacctgcgcgccctgcgcgaacgtgtagtagaactgcaccttcttgccgtagttgtgcggcttgttcgtgtccggatcggtcttcgtgaagttgctcttcagctcaagctgcaccagctgcttgttgtcgatgatcttggcgtacgcgacgttctcggtcttgagcagggcgaagccgtccttggtgtcgatggtctgcgtgccggcgccggcgaacagctggaagccggcgaccgccatgaccaccagcagcacgccccacagccacggggacttccagaacggctgcgggccgcctgagttgtttcccttctggttgccgttggggtcgctgggcgaattgcgtttgaacgggttgccgttgccgcggttgccattgccactcggcggcatctgctgagggccttgaggatagctcatacctgattattctccttgatacacttcgggcttcaacacggcgatggagtcaagattgcggaatcgctcgtcatagtccaggccgaacccgaccacgaactcatcgggaatctcatagccgcgataccgcacgtcgacgtccacttcgcggcgcgacggcttctccagcagcgcgaatatctccaccgacgccgcgccgcggcgcttgagttcctcgacgagccatgccaaggtacgccctgaatcaacgatatcctcgacgataagaatgtgccgaccgcggacatcgcaggacaggtcctgccgtatggcgatcgtcccgctcgattcggtgcccgacccgtagctcgaaagactcatgaaatccatctgcacgggaatgctcagcgcctgcgagaacgcggcgatggtgttcacggcacccttgagcaccgcgaccagcagcaggtcacgcccctgatagtccttgcttacctgcgccgccacctcgtgtatcttgcttgcgatctgagccttggtgatcagctcatggtcgatctcgtcttgaacatcagcgatttgcatggagaccatcttggcacacgcgaatgacgtgtttccgacgaaatgctgaatgaccgctgggaagtgccacggcaccctgaccgtgccactgcgagatcagccggtcgacggcgtcgacgtgatgaaacccggcctcgatgccgaccgccgcgagcgcgtgcgcgatcacgcgcaatctgatcgcccgcggctcccgcgccaacgctttcgcgtcgatccgcaacagctcgcagtctccgtcgacgctcccgcacgaatccccggcgaacgtcaccgcgtgcgccgcaaccgattccgcgataccgtcgagatacgacttctcgatggatgcgagttcggcaccgtcacagaacctgctcacgatatcgccgccggcgaacgcgttcagatagggaatcagcgtgtggcggacgcgcgagcgcagcgggaaatcgtctggcaacggttcgtccgcagccatatggtcgccgttggtcgggtcatcccaccatgtgatcccgaggtcctcgcagatgccggtcgtgtccgcgcgggtcagacgcaggaacgggcgggcgaaccgcacgccgtcacgctcgacgatccgcggcatccccgcgagcgcatccagtccggaggaccgcagcacatccatcagcacggtttcggcctggtcgtcgccggtgtgggcgagcagcacgcatgcggccgactcccgtcgggccgtatcggccagcgcacagtatcgcgcgtcgcgggccgcggcctcgacgccgtgaccgtcccccgacacttcgaccggcaccaccgcgaccgggtcgagccccagcccgcagcatcgccgtgccgccgactgagccacctcatccgaatgctcctgcagccgatgatcgaccacgacggccccgcatctgatgccccacgacgcacacacgatgccggccaccgccgccaacgccatcgaatcgcgaccgcccgagcaggccaccagcaccagcggggcatcgggcgcgggggtatggtcgccgtgctcggcgaagcgcggatcctgcctggggagtcccagatcgaccagcatggctcgcatccggccgatcgcggcacgcatcacagcggtatatggcatgggtcgaaacctttacagcttggccagtttggcggccatcacgttgatcgcctcgatggccgaccactggttctccgggtcgttgacgatcacggcgaacgacagcacgccgcccttgacgcgggacacgttgccggcgagcgaggtcacggcgtcgaggctgccggtcttcacgcggaacaggccgttgtccgggccggtgacgatacggttcctcgccgtgccgaccaggccggggatggacagtccctccgccgccgcggtggcgatgccggcggtgagattgcgctcctgtacctcgatcagcgtggtcacgctgaccttcgatcctggcgtcagaccggaacagtcggccatctgcaggccggacgtgtcgatgccctgctcggcgagcgtgtcggcgacggcctgcgtgtcggtcttgatgctgttgccggcctgacgcttgagcgccgtcagacggccgaatagctgggctagcgtattgtcggaatgcctcagcataaacgccatgacctcgttaagcggcgccgagttgaccgaggccagcgctgaagtgccgcttggcgccgcgcccgcggtcggcccgaacgtcacggtgatgccgttgtcggcgagccgcttcgcgaaggtcgtcgccgcgtccagcgcaggctgctgggacagcaccgggtattggctggaatcgtcgggattggccggcttgaccatgtcggtccaggtgcgtccgccgtcgacggccatcgtggagatcgccgtatagtaccggtgctccgcgttgttttccgtgacgccagccggcgtacgatcctgcccgaacagcgaatcgtcgtacagcaggtcgacctgcgtgatgccgcgctgcttcaacgcctcggcggtgcgctgcgccagcgtgcccagcccggcatggccgttgatgtgcgagggatcgctctccccgtccgacagcagcatgtcgccctcaccctgcagcaccacggtcttgcggttgtcgtcgccctggatgagataggtcttggtgtcgagcgtggagcccatgtccagcgtggtcgccgccgcgaacgcggtcagtgtcttcagggtcgatgcgggctggcggggaatcatggcgtcatgctcggctacgatgttgcccttgccgtccgcgatggccagcgagaaggatttgcccacgccctcgctggcggagaactcgtcgaggatggtcttcgcggcctgggcgtcgacgggcatggacgcgtcgacgccggcggcgaccgtgccgcccgtgagcgcgtcctgcgggtcgggaatcgcgacgcggtccactccccgcaacgtcaggatgccgggtgccacgtcatagatgtcagccacgaaataccccgccatcaccgcgacggcgacgacggcggacaccgcgacggtgacggtacgccgcgtcatcggcagatgccgaatcatatgatgtcgggccgcagcctttgatgccacgagcgaactccttagacagacgttacatcatcgccgcaagggcgccgcccgaaccggctcagcgctgcagcgacgcgaacgaatccaacgtctggacgacacggatcgcgcgcgcatccaacagcttaccgccaagccatgaaccgatgaccatggccgccacgccattggcgagaccgaccggcgccatgacccatagccagccgcccatatcggccacaacgagcacgatcgcgacgagaatcgtcggcagcatcggaatcagacagccgaaaagctgcacgaacgggaacaatccctgggcgacggcacggccctgcggcgtggagaacggcttgtccatcgacggcaccggatacatcagcgagcagttggtgatctccgcgacgccgatgctgctgaacgagacgcccaacgccagacagatgaacgtcacgcccaggagcaggccgtcagccgtgcgccaatcgccggtcaacacgaagcaggccagaccgagcaccaccatatatatcacgttgatggacgcgaacacccgcatgcgggaccgacggtcgtcccagccgcgcacgccggccagcacctccagcgtgaaaccgcggccgtcgtatgccaggccgttgccctcggtcatctgcatcatccatccgccccagatcagaccctgccagatcacgatcgtgatgccacgcgactggagcgcgaacaacgccacgaacaggacgggcatcacgaacagcaggatctgacgcgggtcgcggcgcagatacgtcagcagacgggcggacatcgcgccggacgtgctgtccggcatccagccgaacgcgccgatgccgcggaccttcgcggcacgctcgggcgcacccgcggtcacgcggtcatgacgcaggcaccagacacagccgacgaagcacaccacccacgtgacggccaggatcgccagacgagccacgaacaggagcgggttaccggtcaataggtcgtacggcaactggaacgcggctccgaacggggtccagctcagagcgtcggccacgctcagatccgtcaatgacggaaaatcatacagactgccggaatcggcggggttgtcgatgatgttcggcagctggcacagcacaatgaacacgatcatcgcgatgaggtagaacgcgttcttgccacgtttcgagcgcaccagcgtcgtcgatgccgaaatgaccagcttggccagcgacatcatcgtgatgatggccagcggggcggcgatgagctgcatgacgaccatgcccacactcatccaccggtatgcgagggaccacagcatcagtgccagcgtgccacagatcgcaggcagaccgctcaggccgccgagcagcatgccgagctgcagtttccggtcgggaatgccgtacagcgcgaaccggtgcggagccatggtcgagccgtcgccgacgagcatcaactgaatgaacaggatgatgaagccggcgaacgtcgacccgtacatcaccgcgacgtgcagcaccccgtacatccaccccgcagggatgtgatgacccgccatatcgaatacggggccgccgaggaaccacgcgagagcgccgactcccacaagggcgccgatgccgaatacgatgccgagcacatagccgatggtctgccacgtcgacttgcgcagggtggcaagggtgagcgcccagcgcagacgcaccatggtcaaagcgacttccatcatgactcctcgggcgatgggaacggggcggtgggcgcagacgagtcggcaggggcgacgccgttcgccgcgtatccgccgtcgagccacgacaacttggccgcggcatgccggccgccgaccagctgcaggaaccgctcctcaaggtcctcgccggccgacacctgctctatcgtgcccgccgcgcggacctgtccggcgttgatgacggcgacgtgcgtgcacatcttctccaccagcgacatcacgtgcgaggagatgatgaccgtgccgccggtggacgcgtactcggcgaggatgtccttgaggttcgcgctggacaccgggtcgaccgactcgaacggctcatcaagcaccaggatgcgcgggctgtgaatcatcgcggacgccaggcagatcttcttggtcatgcccgcggaataatcggacaccatcgtgtccgcggcggaaaccagatcgaaggcgttcagcaggtcgccggcgcgactgtgcgccacatcgcgcttcatgccgcgcagcatgcccgaatagatcagcagctgcattccggtgagccggtcgaatatctggtcgggctgcggcatgacgccgatctcacgtttggcggcgttgacgtcctgccacacgtcctgcccgaggatcatcgcggtaccggcgtcgggaaccagcaggccggtcaccatgttgagcgtggtcgtcttgcccgcgccgttcgggccgacgaggccgaaaaacgagccgaccgggatgtcgagggacagtccgttgaccgcaatcttgcggtcgaagcgcttgtacaggccgcgaatggagaccgccgcgcgcgggtcgggcggcggcagtgtcgcaaccgcgggacgggaggggacggatgacgatgccgtacgcgcgggaaaaccgccaatctgcggctgattgtctatactcatgactcaagcatagaccatgcagcggtatagaccaatcatcccgcagatcgatgacgggtcggcggcagccagcatcggcccggccggcggagccagacatcgctgccgaacgccggtcgaagcacggtccaaaaccgctcagcccttatgcacgattggcttccactgagccttggagaagatggcctggaacgaaatcggcatgtaactgagcatgtagatggggaaactcagcacataggcgaacagctccttgttggtggcgccgatgtggtcgcgttccgcgacgatcgtcaatgcggccagtgccatcatcgtcacgaccgccagcacgatgtcaaaggcccatcccgcaatcgcactgagctggctctgccacgtcacgaatccgaacgccacgaacagcaggcccagtacgatgcggatgacgcccagcaccgtgaacgggcatagcagcagggtgaaatcgacggacgagaaatcacgctcacgcacggcccgcttgatcagcgccatgccgtaataccggaacacctgcaggaatcccttgctccagcgcagtcgctgacgccagctctgctggaacgtgaccggctgctcgtcgtacagcatggcggtgccgcagtatccgatgcggtcgccgtgcaggatggagtccatcgtgaattccagatcctcggtcagcagatggaatttccatcccctgttgcgccgcatcacctcgcgagaaaacatgaatccggtgccgcccacatgacagctggagccgaggatcatgcgcgaattgttcaggaatcgcgactcgcggatgaaccacagggccgaaccggacgacacccagttgtcggccaggttgaccgaattgcggtagctggtcaggatgcggaaaccggactggaaggccttgttcatctcctcgacgtaatgacggtcgagccggttgtcggcgtcgaacacgaaataggcatcgtagtcgtcggccacacccgagtcaatcatggtgctcagcaggtacgacagcgcgtatcccttgccgatcagctccgtgtcgtggcgttcgacgacatggcatcccatctcgcggacgacttcggcggtgtgatcggtacagttgtcggccaccagccagatatcgatcagcttgctcggataggtctggttgtgcagcgagtcgatgaggttgccgatgacgttctcctcgttgcgcgcggagatcaacacggcgtagcgcttgtccatcggcgcgtccgggaagtgcaccggcttggagaacagagacatgatgacgcagatggcctggtagatgatgccgacgccgcccaccaccatcataagcacgtcgattacggtcagcaatgccattagcgccacctgcttcgcggattgtcggtagacccgtcgccacggcgtgggcgggcggtctttgcgggacggtcggctgctggcttcgcggcggtgccggatgattcgctgtcggacggtctatcggaggaggtcttcgcggcgccgggctctgcagagccgtcgctgctaccatcatcgccatgcgcctgtgcggtaccgtcaccgactccgcgcaatttcacggcgttgcccgacttcgccccctcgcgcacgctgcgcgacagcacgtccttcggtatggcaatcgtttcggaatcctcggtctcgttggcctcgtcaaggtcatatatctggtcgcgcagcgcacgtagctcgtcgctgatcggcacatgggcgctcgatcctttggcggcgcgcggcatatggtcgctcatcggcttgatcacgcgctcactgaacgcctcggcgccctccacgaccttggacttcttccccggcaccggatcgctcatcagcggcgactccaccagcgcatagcgcttcgtgtacaccttgaagatggcctgcatgctcgccgtgaccggcagtgcgaggaacgcgcccagagcgccgaacaacgcgcccatcaccagtacggcgaggaacgcgacgcatgggttgaggtccatcgtgcgctgcgagaccttcggcgagagaatcaggttctcgatctgctggtacacgatgatgaacaccagcacaccgaccccgtaccacaggccattcgacccccaggcgaacagcaccggcagcgcgccgccgatatacgtgccgaccgtcggcacgaactgcgacacgatgccgcagaacaacgccagcggcagccaatatggcacgtggataatctccaggaaaacggccgtgcaggtggcgttgatggcggccaggatggagcgggagaacaggaagccggaaatctgctcctgcaccaccgtccagccgagcaggaaacggcgctgcgtgttcggtccgagccactggcacaggctgcggcgcatcttcgggcccgcggccgaaatatagtacgtcaccatcaacacggtcagcagattcaacaggaagctgaacacgcccatcgtggtggtcaacgcctgaccggcgaaatcggtgatccacgacgtctgcacgttcttgaatatctccatgccgaggttctctatcttcggcatgtcgaacgatgtgtactgcttcaccgcgtccacgatctccgtgtatatcgacggaagccccttcaccatggagatcagctgctgcacgaacatgttgccgaacagcgtgagcaaagccatgacgatcacggcgaggccgatcaggctcaccgccgacgcggggccacgcttccagccgtgtcgcaccatcgagaccaccagcggctcgaccgccagcgcgatgaatatcgagatgacgacatccagcacgatggtcgatatcttgccccacgatgtccacacgaaaatcgcggcgaacaccgcgatgaccgtgtacaacagcgcgcgcccccaccaatccggcggtcgacgcgaatcccctttggcggggaacaccgacgccaaatccagtttctgatcatccgtttcactcatgagaccctattgtagccagcgggagtgtacgcacaggtgcttatcctgtaagtatgctcaacgtttcgattatcatccccgcgtggaatgaggaggagcgcatcgccgactgcctgatgaacgccacgcgccagaccgtcgcaccacatgaagtgatcgtcgtcaacaaccgttccacggaccgcacctgcgacatcgtcgaacagttccagcgcgaccatcccgaagctccggtcatcctgctgcagcagaacgaggatcaaggactgatcccgacccgcaacttcggtctgaacgccgcaaccggcgacgtgttgggacgcatcgacgccgactgcatgctcaaacccgactgggtggaggtcgtgtccggcatcttcaccgaggatccggacgccatgggcgcgaccggaccggtggtgtattacgacatgcccgcgaagggtgccgggctcgccggcgacgaccacatccgccggcacacgtaccgggcggacaacgatcaggtgctgctgttcggttcgaacatggcgattcgcgcctcagcatggcacgccatctcgggcgaggtctgccgcgacccggaggacgtgatgcacgaggacatcgacgtgtcgctgcatctgctcaaccatggtttcaagacggtgtactcacagtgcatgatctgcggcatctccgcacggcgcatggacacgtccttcgcgtcgttccaccggtacatgcaacggttcaagaacacattcgccgcacatcccgatcattggcgcgagcaccacaccgagcggcgcctgtatgcgctctacccgtggctgcacatgctgtacccgatttatcagcagcatctggccgcgaaggacatcaacccggccgaaaagatctggttcgacgagcagatcaagctcgtcaagagccatttcgacaatcccgagcaggtggacgccgtcgaatgacgttgaatgacgtcggctgacgccagctaacagatgatggtggggttccgacacggtatgtgccggaaccccaccatcatctgttagccgcatccgttgcggattatcgcggctttctcccgctcacggggccggccggcggatggacgcgccgccgcggaccggtcccgtatcgctctatcacatcagcgaggtgtagatcttcaggatgtcctcttcggtggccttgcgcgggttgcccggcgtgcacacgtcgttgaaggcgtcgtgggcgagcggtgccaagtcggcctcggtggcacccacctcggaaatcgtggtcgggttcttgagatccacggtcagctggtggacggcctgcacggcctcctcgcgcaccttctcaaggtcgccggtgtaggcgtcctcgatgccgaacgcatcggcgatgtcacggtacttttcgccggtgaagtccttgttgtattccatgaccggggccagcaggatgccgttggccacgccgtgggccacgccgagacgaccgcccagcgggtgggccatgccgtgcacgaggcccaggccgacgttggagtaggccatgccggtgatgtaggaggcgtaggccatctgctcgccggccggcacgtcgccgtcggcggacttggccaggttcttggcaatcatgcggatggtctgcatgctcaggcagtcggacaggctccatgcacccggggtgatgtagccctcgatggcgtgggtcagggcgtccaggccggtggcgaccttcaggccgcgcggcatcgtgtcggtcaggtcggggtcgacgaatgcgacgatcgggatgtcgtgggggtcgacggccacgaacttgcgcttgttggcggtatcggtgaccacgtagttgatggtggtctcagaggcggtgccggcggtggtgggcacgccgaagatcgggacggacgggttcttggtgtcggccacgccctcaagggacagtacgtcggcgaactccgggttggcggtgatgatgccgatgcccttgcaggtatcctgcggggagccgccgcccaggccgatcaggaagtcggcgccggattcggcgaacttcttgacgccgtcctggatgcattcgaccggcgggttcggcttgacgttgtcgaacacctcatacggcaggccggcctcgtccagcacatcggtgaccttcttgacagttccggtcttcagcaggatcggatcggttacgatgaacgccttggtgaagccatgggacttcgcgaccgccggaatctccttgatggctccacggccaaaatacgcggtctgattgaagatcatgcgatataccatgctggctctcctttgaatgacgcgcgggcgttgcgctcggcgtatctgctatgacgattcctatcgtacctcgaaaactggaaacatgctgggaaggtaacgcaaacacagcagagaacagttgcggtatagcgctgtagcatacaatcgcccccgcggccttacccctacgaaaaatcccatttgtcaccgcgtaagtttcttcatcgcaagtcccacaaagcagtacatgccgtaccacattatgagctgccccgcatcccgccgccctcattcatcccgccaaagtcccatccgcacgggctgaaacgggacttcgctcggactagacactcggacgacacccccatccggccaaaatccgtttggcgcggcgcggatgcgaccatacacggatgacgtggccagaatgctcatgctggggacgatgcaaagaggcgatttcatgcctgcgcatcaatcagacgcccggctgcgctccgctcaggaatgatgcacggcactcgtcaccttgatggcggtccatgcgccgcgtacggccagcaatgcaagccatgcggcgaacagcagcgagccgacacgcggcgaaatcagcccggcgatcaacgtgcccaacggcgccgtctgacatttccgcccgcgccacgcttgctcttgccttcttcaatcatgctcacgggtttactctagcgcgggtaacgcctccaaccagcaccgggtgcaaattacgggttgaaatcgccgttctgggcaattccccgtgccaaatcgccgttttaaggtccaaaaacggcgatttggcacggggaatcacggattgcggcgatttcaacccgtaatttcgggaagagtggggaaaaaagagaccgggaggagggagggcgctgggggcatgcaggaccgagacgcatgctggccctagctcacgcaatcaggtaagacccatgacccgcccgacttctcgaccagatgcaagaaacccgccatcccaatgtttccaaagggtgacgggttttccgtggtggctccgagcggcatcgatccgctgacctagcgattttcagtcgctcgctctaccaactgagctacagagccagtgaacataaaaacccggcgaaaaccgggtcttcacattccagcgaccccggccggacttgaaccggtgacctccgccgtgacagggcggcgctctaaccaactgagctacggggccatatgcttgtttgcaagcaacgagtagatatattacagagttctgggcgatatgcaacttcggcgtgtcgcagcgcccgcagagcctcccaggcaggcccgaacaccaccgaggatgaacctgaatcccagtatttccagcacttcccgcacctaccctatcagcgccgccaacggcatgatcgcaagactggtgaaggcggagtcgccgtaatccttgtagacacaatcgccgttgatgcagtacgacccgttccaggtttccggatgattcaccatgtatacccccaccgcgatcgcaaaaatgatggtgatgataacgatcacgatggcaatcgcactgatgacgatgcccgctatggcgaacgccttgccgcgctcctgcgtgcggttgatctgccgcagggcgatgatcgagagaatcagtccggccgggcagaacacgaacgacaggacgaacccgacaatcgacatcgtgttccatcgatcgttcggcgcatagtacgccggcacgccataggggttcgcgccatacggaggatacggaggatattgcgcagcgccatagggagccccgtactgtggctgctgggcgccataccccggtgctccatagctgccggtctggctgtgctgaggctggccataccctggctggcccgagtacccggtctgaccataatccggctgaccatatccggtctgaccatactcaccctgaccatacggcggcacctgaccatccgcggcaccggcacccggagcccacgaaccatcgcccgcctgctcatacccggcctgcgtcggcacctgcccgtcattaccgtcagtcggcatggcacttggcgtattcgatgacatctcaggactccttcggtcgctatcgttcccgccgccgctcaccgcccggcgctacgcccagtatatcctgtcaacgccttcatctcaacgccaaggcatcacagcgccatccccgaaccggcgcaatacgatcggacagaccagggccggccgcaccgccccatccgcagacgaagcgacgcagaccggccccgtattcggtcgagtcaccattcagacggcggtacgtccggccataagccgaccgtcaacgcccagcagcccgaccggccacccagacacccggccacccgttcagctgacctgcttccaggtggcgacgtcgatgtggtgctcggggttggcctgccacgcatcccacgcggacttgacgatgtcctccacgtcgtacttggcgtgccagcccagctcctcgttgatgcgcttcggagagccgatcaggtgcggcgggtcgcctgcgcgacgggccatcacggcctcggtgaacggcaggcccgtgaccttcttgacctcgtcgacgatctggcgcacggaggtgccctcgccggtacccacattgaaggcgtcgtacttgcgctcgtcgcggtcaaggtacttcagcgcggcgatgtgagcgtcggccaggtcggagacgtgaatgtagtcgcgcacgcaggtgccgtccggggtcgggtagtcgtcgccgaagatggccggcgccttgcccttcttcaggcggtcgaacagcatcgggatgagattgaggatcgcggggtcctccagctccaccggaccgcatccggccacgttgaagtagcgcagcgcgcagaagcggatgccgaacggctgctcgcaggcgcgggccatccactcgccgaacagcttggtctggccgtaggggttgatcggcagcatcgggacgacgtcctcgggcaccacgtcgaccggcggcacgccgtaggtggcggcggaggacgagaagacgagcttcttggcgttcttggactgggtcatgccggtgagcacgttgagcatgccgttgatgttctgctggtagtaccacagcggcttctcgacggattcgccgacctgcttgcgcgcggcgaagtggatgacggaatcgacgtcttcggcgtcgaggatctcggcgaggcggtcgccggcgcccggcgcggcgatatccatgccatacaaccgcgcgccttcgatgcgggtgggctttccgtagctcagatcgtcgacgacgacaacgcgttcgccggcttgatggagcgcatggacgacgtgggcaccgatgtatccgcacccaccggtaacgagaactgtcatgtctgtcctttcgtgaccgtgagcataaccatcggcatccgcgacgactgaccataaccaatggttaacgatagttgaatgtttgattatgctcgcttttgttatttttccgaacagttttatcgtaacacatgaacataagagaacaaaatatgttcattgaaacattaccgacattccagaccatgcacagatgacaggcgagacgtcccatcgaagcacggcggccacgaaggaggtcaacggccccgggataatatggcacataccacgaccgaccagaaacgaggaaaccgtgccagagcagatcgaacagccgactttcaccccgcgtccggtactgtcgttcgtgcggcgatccggccgtctggacgcgcggctgcaacgcgcgtgggacaactacgccgacacgtatctgctggacatcaacgccggcgaggggtcgctggacgtgcgcgacgacttcacgctcgaccgcgacaccatcgccgtgacctggggcaacgccaatccgctgatcgtcgaaatcggcaccggacaaggcgagaacatcgtcgccgccgcggccgcgcaccccgacgtcaacttcctcgcgctggaggtgtacgaccccggcgtcgcgcacacgctgctgctcgccggcaagcagcggctcggcaaccttcgcatcgcgcaggtgaacgcgcccgaactactcgccgcgaccgcccccggctccatcgccgaggtctggacgttcttccccgacccttggccgaagatgaagcaccacaagcgccgcatcgtgcagccgcagctcgcgcagtccatccacggcgcgctagccgacggcggggcgtggcgcatcgcgaccgacatcgaagactacgccctgcacgtgcacgaggtgatggacgggcgcacggacttccgcaacgccggcacgatcgccgtcagcctgcccaccgggcacgtcggcaagggcaacgctgagctcgccgacgacatgccgcacgccgatttcaccgaatcggagcgattcgacgaccgggtgctcaccaatttcgaaaagaagggactcgccgcgggccgggtcatccacgacctcacctatatcgcggtgtgacgccgattacggcgtgtcgcggatttgcattatcgtcgcagctcacgtaatgtatatcgagttgtcagcccccatcgtctaacggttaggacaccagactttcaatctgacaacgagagttcgactctctctgggggtactcaccagctccgggttccacgaggtatcgtggcccggagccttttgtttccaacggtttcaggccatcagcttggccatcagcttggccttcagctgctcgaacaggaaatcgcgcggtggtcgctgccaccaaagatgcacctaagttcctctctcccagcatctgacgcatgagcgtgtcgtccagcagggacatcacgggcacgccgaagtagtcggccagcgccgcgatgtcggggatgctccacgtgttcttgttcttcatcttcgcgctgactccgcccctggtcatcttcagaggctccgtgagcgccgtctgggacaggccgtgcgcggtgagggacgtggagccgaagacaaattgtcccggaatcttggacagaaagtcacccaatagacaagtgataaacaattctcccctcatccccttcggggatgctcccctcaacgccgaatcagcctccacgaagccggtcgctgatccgaagcccgaacccgttccggcgaccatggccgatcgcaaggccgtccactcgctgctgatcgacaggccgtacggtgagatcgtcgcgacgatggactgggcgtaccgatctacggggcggcgctgctgcgcacctcgttgtgtcaggaacacatcgaaggcgtcatctcgcaggaggcatgcccggtatgcgcatacgacaaacgcaaccacgccacccacggcatcgccggacggcgcaaggcgaaagccggcgcacaggcagaggcggtgcggccatgagcggggacgggcagcatcttgaggcgcggaagaaggccagcgaatgccgcgacttcccgcaaccatggtccgactacctgtggtcgctggagttcgagcaccgtcccggcgacgcgaagccgttcatcaggcgctttgcggctgtttgcttatcttggtcgaaaatatcctacccaaaaagcgctcttctcttactcccccaacaacccaacggagaaaccccacccacgagaacagcaatagcgcccaattttctcaccttctatttccttcaaataagaacggcgggctcctttgacaaggagcccgccataatccttttatcagccgccaccaacgcggtatgcggtgcagatatcgggatcattgacttcggaaatcatgaacgcttcatcctgcatgattcacctcagctcgaccctactgcttgtcggcttcctcggaggcgagtcgtccttcgagctgttcgacgatgtgggcgtgcatgttctcgtcgatcttgacggtcaggaggaagacgacgaggctggcgacgatgccggcgagcggcaggtagtaggcgcaggtcttgaacgtgcggatgttcgcggcggtcatgtcggcggcggtggcgttaccgaccattccggcggcgacgaccacgaagcccacgatgccgttggacagggcgccagcgatcttgtcgagcatcgggcgcacggagagggtgacggcctcgttgcgcttgccggtcttgagctggccgtattcgatggagtcggtcatgctcaggatggcggtcatctggatggtctgcgcgggaaggtagaagaggacgagcgcgacgatgacgacgggcaagttcatgggcgcgatgatgaacagcgtgtagccggcgatcatgagcgccatgccggcggtgtacagccagcggcgcgggatgcggcggttgagcaccgggtagaggggcgtggtgcccagtccggtgatgaccgggatgatgccggcgatggagaagctgtccggagctccgagcacgtacttgaactgataaaaaagcacgccggtggtggcgacgttggccacggagtacagcagatagctgagggccacccacaggagctggtcgttctgggcgatggccttgaacgcctcgatggggttgccgttggcctcggccttggcgcgcagcccgccttggttctctcgggtgccgaacgcgacgctccacgcggtgagcaagccgagcacggcgatgatgatggcgaacgccgcccagccggtgcggccctgctcccactggccggtgaacttccaggtgaaccagctgacgacgggcacgacgatgacggtgacgccgttgtagccgatggatccggtgaacgcgccgagcgcggtgtacgtgctgcgctcgtgcgagtcggaggagatcgcggggatcatgccccagtaggagatgtcgcgcagcgagtagatcacgtcgagcaggatgaacacgatgacgaacaggaccatgaacacgccggtgttcacgtccacgaggccgaacaggccggtgaacaccatgatcagcaggatgccgggcacgatgccgccgatgaactgccacgggcggaaccggccccatcgggtgttcgtgttgtccacgaggttgccgagcagcgggtcgaagaagatctccgcgatgcggatgaccaccacgagtccggtgatcaccgcgatgaggcgtttggcaagcgtcttgtccacgtcgatgaacagcgcggtggtcacgaacgtgatgaagaacgtgctcatcgtgttgtagaacgcggcctggcccaggttaccgaatgcgtatgcgatcttctgacccgtgttccgcgtgggctgcggccttccggtcgtttccgtgtgttgtgtggtggatccgctcatggtgtggtggcctccttgcgacctgtaaagaatccgtgcgcgtgaaccgctccgatcccgcaaagcgtgagtatagaactttcttgaaaaagtagaaaactataccgcgtgtcgcaaatcatgccaacgttctgcaaccggcactccgtgtggatgagtaaggtttgaagcctgcttgatgtgcttgaatcttaagaaatccacgtattctgcatgttacaggccttgtgccgcgaaatgctggaaagaatttgcgcaatcaagtaacaatatttatccttgttgtacaaggaacccgattcaacgaggttccctcactgcggcggcaacgacgcgacgcaatccgatgcgaaagcgaggacatcatgaacacaaccgacgatcagcggaagaacggcgatccgatcgtctccccgtccataccgacgacggcatggctcgccgacccgcgcgtgtacgcggttcaccggctcgacgcccattccgatcatgcgtgctggtctcgctccccagtcgacggcgagagcacggatctcaggcagagccttgacggcgaatggcgggtccgcgtcgagacggcgccgacgggtcgtttccccgatgggacgagcgacgggccggactggagcagcgacatgtcgcctctgttcgccgcgcccggattcgacgattcgtcgttctcacgcgtgcaggtgccctcgcatctggagactgcggggctgcttgccccgcagtacgtgaacgtgcagtacccatgggacggacatgagggcccgaaggccccggccatccccgagcatggccatgtggcggtctaccggcgcgagttcgacgcggatggcgaagtcgcccaggccgtacgcgaagggcgcccggtgacgcttaccttccaaggcgcggccacagccatctacgtgtggctcaacggctcattcgttggctacgccgaggactccttcacgcccagcgagttcgatgtgacggacgcgatcaaggtggacggcaacgtgctggcggtcgcctgctacgagtattcgagcgcgagctggttggaggatcaggacttctggcgtctgcacggcctgttccgctccgtcgaactcaacgcgaggcccgccgcccacgtcgccgacctccatgccgacgccgactgggatctcgccacatcaaggggttcgctctcgctggatgtgctgatcgacggtgccgcgaacgccgcgacggccgacttcgcactgcgggacaagaacggcaccatcgtctggcgcaccaccacgaaagcggacggaacgctgcacgccgaggccgagatcgatgacgcggcgccatggagcgccgaacgccccgacctgtacgagctgtccgtcaccctgctcgacgcggacggcaaggtcctggagaccgctcgcactcgcatcggcttccggcatgtggccatcgaggacggcatcctcaagctcaacggcaagcgcctcgtgttccgcggcgtcaaccgccacgagttcgactgccggcgcggccgggccatcaccgaagaggacatgctgtgggacatccgcttcatgaagcgccacaacatcaacgcggtgcgcacctcgcactatccgaaccagtcacgctggtacgagctgtgcgacgaatacggcatctacctgatcgacgagaccaatctggagacccatggcagctggaacagccccggcgacatccccgtgggaacctccgtccccggtgacgacgaggcctggctgggcgcgtgcatcgaccggctggacagcatgatcctgcgcgaccgcaaccatcccagcgtgctcgtctggtcgctgggcaacgaatcctacgcgggcgaagtcctcaaggccatgagcgcgcacgcgcaccggcttgatccgggtcgtcccgtccactacgaaggtgtcaactggaaccatgcctacgacgggatcagcgacttcgaaagccgtatgtacgccaagccggccgagatccaagactggctcgaacacggcgacgaacggggcgaggcgagcaagccgttcgtcagctgtgagtacatgcatgccatgggcaactcgtgcggcggtctgagcgagttcatcgacctcgaacggtacgagcgctactccggcgggttcatttgggattacatcgaccaggggctcgtccagcgtctgcccgacgggagcgaacgcctcagcgtcggcggagaatggggcgaccgtccgaccgactacgaattcgtgggcaacggcatcgtgttcgccgaccgcacgcccagccccaaggcgcaggaggtcaagcagctgtattcgccggtcaagctcgcccccgacgggcacggcgtgaccatcgagaaccgcaacctgttcgccggcaccgacggctacgtgttcgccgcacggctcctcgaagacgggcatgagatctggcatgccgactaccgtttcgacgtggccgcaggagatacccaacaccatgacatcgccttcccggacatcgacgcggacggggatacgcgcgaagtcacctacgaggtcgatctcctgctcgccgaagccaccgcatgggcgccggccggctacgagctcgcgttcggccaactcaccgacacgctcaaccccgaacaggacatcaccgagaccagccatgacgacgacggccgcgcaactcgcacgctcagccgatggaacgccggcatccgccgcgacgacgaggaaattctcctgtcacgcactcagggaggcatcgtctcctggaagcgcgacgaccgggaaatggtcatccgtcgccccgaactcgtcacgttccgcccattgaccgacaacgatcgcggcaaccgttccggtttcgaccgtgccgcatggttcgcggccggccgatacgccatcgtaaccgaaacgaaaatccatgaaagcgatgacggtctcgtagcggaataccagtacgagcttgccgatccgaaccacacgcccgtgtccgtcacttaccatgtcaactccgatatgcgtatgcaactgaccgtcgaataccccgggaccgccactgacatggccagtctgcccgcgttcggcatcgaatgggagctgcccggcgaatacgatcgtctgcactactacggccccggccccgaggagacctaccgcgaccgtaagcagggcggcaagctcggcatctgggacgccaccgcgaaggcgagcatggcgccgtatctcatggtgcaggaaaccggcagccacgaggacgtccgctggctcgaagccaccgacatccaaggccacggattgcgcatcacccaacgcggcgaccgtcacttcacggccagcctgctgccctggaacacctacatgatcgaggccgcgcgccgccacgaggacctgcccgaaccgcgccacaactacctgcgcctgctcgcggcccagatgggcgtcggcggagacgactcctggggagcccccgtccacacggcctaccagctgcccgccggcaggccgctcaccctcgacgtgaacctcgaactcatctgaccggcaacgggcggcggcatgcaccaccatgccgccgccggccccgcctacgacgcggcgatcgaggccacgggcgctgcggccgcggacggcaccggcgaggaggcgttcgagcgcgccggccacgcggtccacggcaccacccgccaggtcctctcgctcatcaccaacccgatggacgtgatctgccgcaacatccgcaccgtgcgcgagaagatggcaacccgccccgacatcctcggctgccacctcgaaggcccgttcctcgccctcaagcgcaagggtgcgcacgagccgaactgcctcaaggacccggtgtccgaactcgtggaccgcatgctcgacacctcgggcgccaacctcgccgccggcaagctcggctgcatccgccagatcaccatctcgaccccaccgactggaccgcccaacacgtctggtgcgccggccgccaggtggagtaaactccttccagcaaaatcgacgccggtgccgcccgtcttcgagacgacgtcttacgcctgaggaacgaagcttgcgcgcggcaccagttcggtcgtcagcaggatgtgacgatgcgcccgccgctcatgcttcaacccatcgatcagggtggagaacgccatgcgggccaactccctttgatcgatcgcatacgaactcagcggcggcgacgtgtaccgggcgatcgactggttgttcacactcaccacggccaactcgtcgggaacctccacgcgcagtgcgttcaacgcctgcaacgcccccaccgcaagcacgtcggcggccacgatcaaaccatcgggcatgctgccggcctcacgatggtcagccaccaactgctccgcgagacgatagccgttctccacggtgaacgtgccggacgaatacaccaatccgtccgtttccaatcccagatgcgcggcccactgacggaacgacagctcgcgaatgtcctcgggatagtcatgcatgcccatgatgctgcccacgccgccgagaaacgcgatacgactgcggcccgccgcgatcatcgcgtccaaggcgtccagcatcgtctgcgacagatcgggacgcacggagtcgaacaggcgcggcgccggattcgtgtcgatgcacacgccatgcgggagcaccatatgcagggcgcgcaggtccgcttcgggaaacaccgtggctcccacggtgatgaacccatcaaactccgttgcgcgttccgtcaactcgtgtatggaccggatgaacgtgggctggtccaattccaacgactccgcacgctccgcaagaaccttccgcagatcggcgaagtacgcgtcctgcaattcctccccggacggaggcgcatccaacaccgcgatcgcgggacggaacacgttgcgataccccatctcctcgcacacgcgcaacacacgccgacgcgtctcctccttgatggagaacgacgggtcgttcaacaagcgtgacaccgtgctctgcgacaccccggcccgtcccgcgacttccttgagcgtggccatgacatcctccccgcaaactttagtaaagggttttactacagcataacccgggaaggcggggttagcggcattggcggcttggaagtttacccatgactggtagaccgcacatgtcccggcaataggggcaatgcataggggggtggcgggcatgtgcagcaacattcccgtcaccttacgattcctatagcgtgtcaggtaaaagaattatgattctcaatccaccttccggccgcgcctgcagactcaaatggccatgatgcatagcgacaatctcttgcactatggataaacccaatccgtgatgaggtgatgcagatcccacatgcgtatttatcctattatcctcccctctgttaaaaggtgacaggaaatcatctatcctcgtatcggaaagatccatgccggtattggatatgtctatcgcaatgcaggactcgccttcgtattgcctgtcgttggctaagtttatccatacatgtggttgagccgcacgattatgctgaatggcattcgtaataaggtttgcaatcatctgtctaattagcagaccatcggctaggatatatgcattctccagattggtatgtacttgaactctatctccgataagtcccatattttcctgaagaacattgcgaatgatctcagctacattaactcggctaaggtcagctcggtttaattgctgaactttcgacaattcgagcagatgattgacgatttcaaccccagcatgatttgaagccaaagccttttcgacgaaaggcctgcaacgctcatcgaaaagctggttgtgcagcggaatctccaatgcggccgaagtggccgcaagtggattttttaactcatgtgacgcatcggcgataaattccttttcccgactgattgcgctgttgagatcctttaacatgaggttgtatgcggatgcaatagtgtacgcctcgtcgttttcatatggaataacgataggttgcctttccaatccagcgtcggacgcgataatctgagaggccacactattgattcttcgttgtgtcctagtggcgataatccaagttattcctccagataatatgccgaaaacaatgatgggggctatgcttaccgccaatatcagatcccgggattttatgtctccttgttccatagttagcgttaaagcatccttaccggagtcatacccggcagaaacgtaatccttatcggattcaggaggaatggcttgcgaattcaaactatgttgttcatcggcatcttctgcctgagtaaaagatttatttacggtcactgtttccagttgccggttcacgacataatatgtcatggcggtcaccactccggtaagcatgaagaacacgatgacgatcgtggtgaccaatcttcttcttgtagaccactgaaacggtaaacgcagtttcggatggctggaatggctcccattcgacgaaggatattcaggctttttcatgatatgcgatatccttgtccgggaacggtttcaatgaaatcagtgattccgattttcgtgcgaatcgcatagattgtggtcttgacgattcctctcgtatgagcgtgatcatcctgccaaatctcacgatatagacattccgcactaatcaccgcacctcgcgcctcaatcagcgtcctcaatacggcaagttctcgtttcccaaactttagttctgcaccgcgaaccgtgatggatcccgttctgaagtccgcagaaaagtcatcccggttgtagaccatgtcattcaccatgctcaaacgccgacgcaccgcattaactctggccagcagttcggcgtattcaaatggtttcgttaaatagtcatctgccccaagatcaagcccgcggactatgtcctcggtctgagatgccgcggtcaacatgagaatgtgtatgggatcacgccgttcgcttaacctcttagcgatttcgtcaccatgcagtccgggaagatcgcgatcaagtatcagcatgttccactccccggaattcagttcctccagggcatcccggccatcgtaaacagcttttgcctccatgccttccatggagagtcccatccgtaccacatcagcgagattggcgttgtcttcgacaatcagaaccttcatccgtccagctcccttcgcgaaacaatgcgcacaccatagcattcgcgtccaacctggtcaggaatcggtcaggttcagtcagcggcaggtcaaaacccgccttgccagccgtgcacgtcgtagctttgactccggctggacggacttccccgtcgcggcctctttcacagaagaaaggaaacaacatgatgaacatgaagaaaggaatacatatgtcaaaagatgcgttgcgcgtggttgcggctgccggtgtgttgtcagtggtgttgggtttgggggcgtgttcgatgccgggttccgggaatgccggtgcatcagatgggggctcctcctcgtcttcgtcgtcttccggatcgtcgtcgtatgaggcggagttgaagcaggcattgcagtcggcgtcgagtgatttcgagcgcggggtgttggagcgcgcggtcaaggccggcaggatcagcgagtcggattaccgcgaggcgaacgagaagtaccaggagtgcatggccgccaagggcgacgacgtggagttcgacacggaccagtccaccgggttgatgcaggaacacatgaacacggacgataattacgattcggccaaggcgaacgaggacagcatggcgtgcgcgaagggcacgaacctgcagatccgcgacctgtacgagcgaatggtgcagaacccgtcgaacgcggacgagatcgaactggtcgtgggttgcctgaaacgacgcaagctggtgcctgattcgttcacgaagcaggattacctgaccgagatgggcaagcccgaggggtcgtcgaagctggacacgtcgtcggacgcgttctcccagtgcctggcgaacccgagcaagtagaggaagtgttgctcgtgtttcgacagggaagaatagtgcccgcacgcgtcggcgggtgaacggcgtggggttcgtggcggcgtgcatggccgcgtgtctggcggcgggcatgggcctggccgtggggctggagcggacgatgacgccgccgtccctgtcggattcctcggatgcgggaaatctcgcgttggggtcggaggagttcgacgacgtgcgttccctaaacgtggacgtgacggcgtcgccggccggtggggtcgcgttcccggtgtcgggccgggccacgttcgcgtcgtgccccgcggacggcgtggtgcgttcgggctcacgcgagtacgacgtggacggcacgcctctggtgagcctgcacacggacactcccctgtaccgcgatctggcgtacggggacaagggcgacgacgtgacagcgttgcagaacgagctggccgcgctcggctacggcggctcccggtcgggcgtgttcgactgggccacgtgggacgcgtggcggcgcctgtacgcggcgaacgccggcacggccacggcggcggcccgagtccagcagggcgcgttctcccgcgcgttggcggtgtggctgcccgcgcagacgatgagcgtgtcatgcgcggcgtcgctgggttcgaccgtgaccggcgattcgacggattcgctcgcgttccgcagtctggccggggtcgcgtcggtcaaggccgcgtccctgccggacggccgcatccaaggcgatcgcgtggtcgaaatcaacggcagggactatcccatcggcgacgacggcatcgtatcggacacggccgcgttgcaggcgatggcgggatggtccacgtacacgggcgcgcacaaggacggcgaggacgtcacgagcgtgaccgtgacctacaagctcaaaaagccgatcggcgtgtactcggtgccagcgtccgcgctcaccgggctcaagggcagcgacggatgcgtagtggcgaccgacggcacaagcgtcaaggcgcacgtggccggcagctcattgggccgcacgctggtcacgatcgacggcaaggcgcccgcgagcatcaaggccgatccgggacaggcggtgtgcgatgcgcgttgacctcgaccacgtcggccaccggtacgccgacggtccgctcctgttccacgatctgaccgcgagcctcgtgcccgggcacgtgtacgcgctgaccgggccgagcggcgcgggcaagtccacgctgctcggcatcatcgccggctggaccacgcccgccgaaggccaagtgacccggcagggaatcgactcgatgcgctggattttccagaacccgcacggcgtggcccaacgcaccgcgatcgaccacgtcagcctgcccctgctcgccaaggggctcccgcgccgcgaggccgaggaacaggcgcgcacgctcatggaccggttcaacctgacccgggtcgccgaccgcaggttcgcggaactgtccggcggagaggcccagcgcctcatgctcgcccgcgcgttcgcggcccagccctcgctcatgctcgtggacgagcccaccgcccagctcgacatgcacactgcggccacggtcagcgaatccctctcccgtatcgcccgcaacgacacgatcgtcgtggtctccacccacgacccgaacacgcgcgacgcgtgcaccgacatcatcgatttgaagaactaccaatgaaccacaccacgatgaaagcaaccgccgtcatctccgaggcatggcgctccatcaccagcggcgcagcccgcctcgccccggccgtcctcgccctggccctgaccgccgccggcatgggcgtcatggacatcgccgccggctcaaccatcctcgaccaggcaagcgcataccggcaatccggagccgacatcctcgtactcaacgcgcccgacggcatcgacgcggcatcctgcgaacgcctcaccagcctcacgaacgcccaggccgccggagcgatccgcactacggacccgctcaccctcgcggccctgcccgacaccaccacgcccctctaccagatcacccccggcctggccaaactcctcgacaccaaacaggacccgaacacgaccgggctgatcgcatcccaacaagtcgccgaaacgctcggcacctccaccggcggcacgatcggcctcgccgacgggcgcaccgcgcgcgtcaaaggcatctaccaataccccgacgacggacgcacccccggatacgcgtacgcgctcatggaggaaacacccgccaccggcacgttcgacgcctgctgggccaagacctggccgcaaaccgaccggacccgcaacgccctatggtccaccctcaccccgaacgcgaaaaccaccggcgacgatgcacccaccctcggccagctcaacaccaccaaaggcgacggcttcgacggacaaaccctctaccggcaacgctccacacgcatcctgcccgcctgcggcgcactcatcgccctcgccatcggatacctgctcatacgcggccgacggctcgaaatcgcctccgcactgcattgcggcgtacccaaacccgcactcgccacgcagatcatcatcgaaaccggcatcaccatcctgctcgccaccgccatcagcctgcccatcgacatgaccgccgccagactcctcatcgacaccaccgaccgaaccgccatcaccctcaacgccatacaaaccaccatcaccaccaacaccgcctacctactcgccaccaccatcaccgccctccacatcaaagaacaacatctcttcacctatttcaaagaacgataaagcgcagaaaatcattagaattacgtgatccgtatattccgaaatcctcatcatcgtcggcggacactatcagcacggcatcctactcgattcataggctgccgttttcatttatcaatgctctcacgaagggagcgtaagacatttagcggccacatcgaggtagggggctggccatgctgatcggctcctcgttggtctgcatgacgcgcgggaggacggtatgccgtggcggtgcggatggcgcatcgtccgacgggctggcgcacggtgtttgtgtcgccgacgttgctgatgttgccgggggtaatagtgatgatggcgttgccggcgcgtgttcgggcgaatccgacgtctggcacaagaccgtcatctgctggctcgtcctgatcgcatacctgtacatccaatgcgagaactatgcgttcgccgcctcgaaggcgaggcgcgagcgctgattcctcgcgggccgacgcatcgacgcgccccgagatggaccaaaatccagaataaccgacattcgccgctgttccgtctttcgcccaaggcgtatatctacccgtatcttgaggtgcatcatgtattgtcgcggctaactaaccggcgaaacgcggcatgtttcgcattttgggcgaaaagcccaagtcccacaggaggtattgatgacgttcgttgcacggtcggtgcgctatgtgctcagaaaacgagtacgaaccatagtgctcctcatagtattgaccatcataacagcgagcatgctatccacgatcgcggtttctcgggcagctcaacaggccgccggacgaatcgagaaggaagcggtcggcgggttcgtgctggccagcaacctgcagggcagcatgctcacgcctcgcggaggtggcatggtgcgtcccgccgacgtgcgcaggatcgcccaactgcccggagtcgattcgtatatggtccgtcagaacgccaccgccgacctcgtgggggcgaatgtggcgaaggtccccggcggcgatgattacgatgcgaccaaggagcagcagttcggcaacgccgccaacgtcataggcacgaatgattcgtcgaaactcaacgtgttcacgtcgcgcacgctcggcatggccgaaggacggcatctgaaggcctccgacaagtacacgtcgatgatccatgaggatctcgccaaagccaacgggctcaaagtcggagacacgctcacgctcaaggccaacgcctacgacgccgacaacgaatcacattcgacggcgaccgtcaagaccaccatcgtgggcatattcaagggcgacagcgccagaaaggtatccagccgagcggaactgaccgccaacaccatctacaccgatctggataccacacgcgatctgtaccagtacaaggacggcaaggaaatataccaggacgccaccttcgtgctgtccaagggcgttgacgtggagaagaccatggacgccgcaaagaaactcccggtggattggaacaattatcagatcacacgcaacgaccagtattcgtcgagcatgctgcatgccgcccgcggcgtgcgctccatgatgcgcggcgccctgatcggcgtgaccgtctcggccgtgctcgtgctcagtctcatgctgctgctgtggatgaacgaccgccgtcaggagatgggcatactggtgtcccttggcgtcggcaagccctccctggtcgcccaatacctcaccgagatggtgctgatcggtctgccgtcccttgccctcggctggctgtgcgcgcagggaatggcccaatggctcggcaccacggcgctccattccgtgaacgcctccgcggcgaaggagctgagcagcatgggacaggtcggcggcgaccttgaatccagcatgtcggtgcgcaccctggattcgctcacggtgtcggtcgacgggaccgccatgctgtacgtggcgctcggattgttggcggtgatgctggtgtgcgtcgcggtggcgtgcataccgatgctgcgcaaatcgccgcgagacctgtcggagattcgatgatgagcatgaatgtgtggaagcgtgccacgttggcgatcgtacgcaagccggtacgcagcggcatcatcggtctgctgatgctgatggtcttcacgagcctggtggcgcaggtcggagtctcgacggccctgcgtaccatgtccgacagcatcggcgcgggcatgggcatagggtttagcgtcagcgccggcgagaatcccatcagcgccgaggaggcgagccggttctcgcgtatccccggtgtgacgaagactgcctatgcgacgaagaccttggcgcaggtggatggcgcgcgcccggtcatgccccggcagggcccccgattggactccgatctggccatgcaggtcagcgtgctgggcaccaccgattcctcattgtccgaggaattccagagcggcctgtaccgtctggagcagggccgccatatctcgggcgacggcgacaatgtgctggtccaccgcgacttcgcgctgcagaacggcctatcggtcggctcgacattccgtctccggcaggaggggcgcaacgccacggtgcgtgtggccgggatcttctccggcaacgtgcaggcccaaagccccttgccctcggacacttccgagaacctcatctattcgggtaggcgagtgacctccgctctgaccggaaacgaccagatcggcatgatccgatgcctgtcggataatccgcaggacctgtccgcggcggtcagtcaggccaagaccatggccggcggcaagtacgacgtcaccgacgattcggcccggctctccggcgtcctgcaatccgtgcagacggtgcgtgatctggtgcgcatggtgctgctgtccgtctgcctcgcggacgtactggtgctggcgatggcgctggtcttctggattcgctcacgcatccatgagataggcacgcttctggccctcggcatcggcaagatgcggatcgtcgcacaactcgccatcgaaaccggactcatggcggtggtcgccgccctgtgttcgctgggcaccggcgccatgctgtcgggatacgtgtcttcccgactgttgcgcgattcgggcgtcgcgccgttggaatcgttgcacgtggaggccttgccgcctgagcagacgctgctcatcctgctgctcggatgcgcggtcatcgccgtggcccttgccgtgtcatgcgccgccgtgctgtccaaatccccgaaatccattctttcctctatgcgttaggagtcaccaattatgtctaactgtctgcaactggaccatgtcgattacgcctacggcgcggcgaagatccttgttctttcggatgtcagcgcggatttcgaatccgggaagatgtatgcgatcaccggcccgtccggcgccggcaagagcacgctgctgtcgctgctggccggcctggacgccccctcccggggagtggtccgcttcgaaggggaggacatcgccacatcgggctatgcgaagcaccgtcgggagcacgtgtccctggtgttccaggaccataacctgatcgactacctcacccccgaagagaacctgcggctggtcagcaccaaggccgatatgaagatcctcgaggaactgggtttgagccgtgaggaatccaagcgcaacatcatgcacctgtcgggcggccagcgtcaacgggtggcggtcggccgcgcgctggtcgccccgggccgcgcgatcctcgcggacgagccgacgggcagcctcgacccgaagatgaccgacgaggtgattcatctgctgcagcacgccgcccatcagctcggcaaatgcgtgatcgtggtgactcattccaagcgcgtcgccgactccgccgatgtcgtgctgcgtctcaggagcaagaaactgacccgggtgtgacccacctgagccgggcggcacccatacaccgcttcggcattctggcaccccgcaccccggcaccccggcgacccactcgcgttgccggggtgccgtattcgttctgcgacataatgtcgtgataatggaaccatgccagtgatgaatgatgaagtgcccggcgagggcgatttcgacgcggggcgtcgacgtggcgagttcgacgatatcacttctggcggattctagcggtggttgcaacacctggtgtttttttggtgttgcaaccaccgctagaatccgcctttctggtgttccccgaatccaagcaaccacccaagctcgtcgaatacttcggcaaggcgctcccctatgccatgaccggcctgctggtggtatacgcgctacgcaacacgccgatcctgaccggttcgcacggcattccggaactcatcgcctgtgccgtcatcacattgctgcatctgtggaagcgcaacatgctgctttcgaccgccggcggcaccgcggtgtatatgctgctgatacagctggtgttctaggagcatgcctggcggcgagtcccgtcaaggatggatgaggaacccgccgcccaacctgccgcagaaccgtcactcgaacggatacttcagcccccactttgcccgcagctcgtccatgagctcgacgatgcgcagcgaatcggcgtgcggcatctcggcgcactcctcgcgcccgtcgagaatcgcgttcgccgcggcggcgacctgatactcgtaaccggtcagctgcgccggcacatcgtaatgctccgccacggcatggtcggcgccgtacacgtcgatcgcttcgatgttgttgatgttgcggcacaccacgtaccccttgtcgccccaaatgcagcccgcacggtcggagcaggcgagcatcgacgacgtggacaccgccatcacgccattggcgtaatacagcgtggtcgagttctgcgcgtccacgccggtcggggcgtatggcgtcatcgacgtctcgacgcgctcgaccggcacctcgccgtggccgcccatcaccatgtcgatgaaattgagcgggtacacgccgacgtcgagcagcgcccctccagccatcgcgggatcgctcatacgcgccttgcccgacaccggatagcacaggttcgccgaaatcgaccgcagctcgccgatcgcgccggagtccacgatccggtcgacgatggcccgtgacggcatgtagcgcgtccagatagcctccgtgcacagcagaccgctgccgtcggccgcatcgagcagcgcacgggcctgcgcggcgttcgcggtgaacgacttttcgaccaggatgttcttgccggccttcaggcaggcgatgccctgctcggcgtgcaggctgtgcggcgtggcgatatacaccagatccacgtccgggtcggccagcagctcgtcatacgagccatacgacaccgggaacccgtattcggccgcgaacgccgcggccctgcccccgtcacgcgcggcgaccgcatacggcgctaccagaccggcataccgcgggtccgccgccatcgccaccagtgttcgcgccatcgaatgcgcgatgcgcccggcgcccagaatcgccacgttgacgcgcaacccctgcgcttcggcctcggcacgtctgccgttcagtctgctcatcattcctcctcgaacgttccgatacatgttccgatggaatacgcgggtatccccgcgaaaccggctgtcaatgcaccagaataatccggcgaacggtatccgccccggctcgccgcggcgcaatccggcgaatatgacgcgacgcgcccggcagtcatgccaaggtgcgtcgcgtttcatcgcatctcgtcgcgtgccgccgcgctccggcggccggccgcatgccgtcatccgatctgccgttccacccaatcgacgatgtacggcgcgacctcctgaatctggccgatggccacctgaaactcgcggggcccgccataccagggatccaccaggtcgatggagtcctcgcggccggccgccggcttgggcagattcgggtcgaaactgcggtacatgtgcacttcggcgcgcttggaggacggcagctgccgcagcagtgcgcgcatatgcgaggccgtcatcggcaggaacaggtcggtttcctcgatctcctcgcgcgtgacgcgatgggcgaaatgatgcgtggggatctcatacccgtcggcccgcagcacgcgcacggcgcgcgggtcgataggatggccgtactcctcgtcgctcacgccgctggacaggacgcgcacgcggtcctcccctatcccacgcgactcgaattcggcgcgaaggatgatctccgccatgggcgagcggcagatgttgcccgtgcacacggtcatcacggtgtatgggtgctgctgtgtcatgatggctcctgatggtttccgatgggcgcctgtgcgtaaggcgcccggtgaacttgcgcgcgcggcgattcagccgatcttgcgataggtgacgaagcggtaccgcttgattccgctgtcgtccttctgcgttctcttccaatggccggggtcggcgacctcccacaggccggcgtcgaccagagcgtccatatcgggcgcatacgtgtctgcgtccactgaggtctggatcttcgtcacgaacgccttgctggcgaaaggcagcgcctcctggaagacctgcgctccaccgagcacccagatctcgctgcggtcaagcccgtcgtcgggaatggcctcctgccgcgcgatgtcgagcgccgcatccagatcggtgacgaccgtggcgcccagcgccagatactggggattgtgcgataccacgatgttgtcacgattgggcagcggacggtacttcacgttcagtgactcccatgtcctgcgtcccatgatcaccgggtgagagacggtgagctccttgaaacgtttcatatcctccggcagatgccaaggcatgccgccgtcgaacccgatggcaccgggacggccgtctttgtcgtcagcttcggcccaaatcaggttcactgaaaacgtcttgggaaagtcatcaccccaatcatcggctttctcctgcccggcgaacccgggctccggttcgtgatagccgttgcggctactatcatgctccatttcattcactccttgaatcggactgggacaatagtgtaacggtcggttcagaccgcaaccggcgccttgatggtgggatggtgccggtagtcgacgatcgtaaaatcctcgtactggtagtcgaacagcgaatcggccttgcggatctcgatcttcggatacgggtacggctcgcgcgacagctgctccagcacctggtcgacgtggttgtcgtagacatggcagtcgccgccggtccagacgaattcgcccggttccaagccggtctgctgcgcgatcatcatcgtcagcagcgaatacgaagcaatgttgaacggcaccccgatgaacatgtcgcacgaacgctggtacagctggcagctgagccgcccgtcggccacgtagaactggaacagggcgtggcagggcggcagcgccatattctcgacctcggccgggttccatgcgctgaccaccatgcgacgggagtcggggtggttgcggatcaggtcgaggacgttgccgatctggtcgatggtgcgattcgggtcttcgggggtcggcgcgggccagctgcgccactgcacaccgtacacgggaccgaggtcgccgttctcgtccgcccagtcatcccagatgtgcacgttgtgctcctgcagccagcgcacgttgctgctgcccttgaggaaccacagcagctcgtatgccagtcccttgaagaacacggtcttggtggtgagcagcgggaatccttctgacaggtcgaaacgcatctgctgcccgaacagggatatcgttcccgtgccggtgcgatcggacttgagcgtgccttcgagcatgatccggcgcaccaaatcctcgtacggcgtggggacgtcactgtgaggacgggcggggatacgggtgcggatatctgcgagttgttccgatgtcaaagccatgccacccagtgtaacgacagcggctaacagcccgacgcgagtggcggagacgacggacggcagcgtgcgatggatgcggtagcgtcacgctgtgcgggtaccgtcactgtgtgcgccctcgcacacagtgacggtaccacaaaccccagtgtttccagcggtttccaagaaaccgtcacgccgcgaacccgcacagcgtgacggtacccgcacagcgtgacgccgaaacatggcatgcacaggcgatttcggagatgaaacgccggacgagacgggggtagacgccccaaaccagacccagatcagaccaaagtacccagcgagcagacgtgctcgggccggaggggcgtccagccgaacgcgtatcacgacccatggcgaacgattgtggtctacattagaggtatgtgtgacgcggcaggcgcgtcatgacgactacacgaggagatacgcatgggcaagcgactttgggtcgagcgcaacaaggatggttcatgggatgcgttcagcgatgacggcgctcacatcaagttcggcaagggccgcggagtgttcactcccggagacctgatgaagatcgcgctggcgggctgtgccgcgctgtccagccagttcgccatcgagcacacactcggtgacggcaagggcgcgaggatcgtcgtggacggcacatatgacgccgacagcgatgcctacatcaacttcaacgagcaggtcgtagtggatgccactgacgcgaagctgagcgaagaggatgcggacaagctcaaggagcgtgtcacgcgccacatcgaaaagggctgcaccgtcaagcacacctatgtgcaggagacgccggtgcgcatggacgtgacggttcgccgctgaggcatcgcggggctcctcccctgtcatataacggcacgggggagttcatgctaccgcgtccgcggcacgagcgccggcacaacaacatcatggccccgccgggcatcgagtccggcggggccactgcatgcatcagagccgaatcaggccttgtgctcggggtcgatggccgaatcgatctgctcgacgacctccggctgcgcggccggcaccggcagctcctcgacaccgccgatggactccaagggcttcggctcgacatcggccggcgagctcggaaccgtgtcaagacgggattccgcggcttcgacgtacttgcggggtacgacatacaccgggccgacggcgtgctggatcagtccctggctggtggagcccagcagcaggccggtgaacccgccgcggccgcgggagccgacgacgaccacgtcatggtcatagctggccttggtcagcgcctgcacggcgttgcccggcaccacggtgcgggtgatcttcagatcggggtaggactcctcgatcggcttgatacgcacctcaagatcctccatgaaggattccatcacggccttgtcgccgtccgatccctgcaccttcggcgcggcggagatcacgtcgagttcggcaccccacatgttggcgaacgaggcggcgatgtccagcgccttcagaccccacttcgactcgtcggagccgaccgccaccttggtgatcgtgttgttcaggtgcatcaggttgccgtcgtcgtcggtatagggcacgacgacgatcgggcagtacgcgtacgcgggcagcgacgagctggtggtgccgagcaggcgctcggccagtccgcccttgccgcgattgccgatgacgatgagattatagttgcgcgacagctcgacgaacacggacgccgggtcaccggtgacgatcagcgtcgccgcctcgacgccctgctcgtcggcgatggccttggccttggaaagaatctcctgtgcgtcgctgtgcgccgcgttgtcatcacccatcgcggtgtacgtggcgtcgaacgacactgcggcgtagctgggcagcgaatacgcgcatacgatctgcagcgtcaatcccgcatgcttggcaaaattggcggcccaccacgtggccttgtaactggcatgagaaccgtccaccccaaccagaatcgccttttcgttgatcatggcaacctccttaaggtaacaccgatgcagcggcgcatcgggtcatagttcctagaataccgcgtacgcgtcaggatgcgggatgaacatcagtcattttgccgattgagaacaatgccacattcctggcgtcggtgtgtcataacgcgcggcagcgcagcggaagcgggcacggcatcgtcgccgcatcacctgtcgaaaaagcacgacagcgccccaatggaggcgctgtgcagtgcgaaatatcgttcgaagactcttcgacccgaagcaaccggcttagatgattcggtaatactcgaaggaagcgtatacaggcacgatggacacgctcttgccggggcgcggcgcgtgaatcatcagaccgttgccgacgtagatgcccacatggccggatctccacatcaggtcgcccggctggggatcgctgaccttcgtgccgtgagcctgagcccacacacgctgctgatagtcgatacgcggcaggctgatgccgaacttggagtacacgtactgcgtgaagcccgagcagtcgaatcccgacggcgtggtgccgccgtacacatagggcacgccctggaactgggaggcgtaggcgaccacgccggcgccattggcgctgaccggggcattgaccgcaccgtcattggagacggacgacgagctggtgctgctggtcgcggccgatgcgcgggaacggctgacctccgccgcctgcaggcgggcggcttcggcggcggccttctcggcggccttgcgctcctcttcggccttcttggcctcttcctcggcctttttctcggccgtggacttggtttcgggcacgttcagggattccacaccgccccagctttcgctgtcatcggagctgaccgatacggtctccttgagcaggtccttacgcgcggtgttcatcttcgggaacgagcgagaagaggtaatcgccttcctgctcgcattatcggaaccggccaaggcgacaggcaccgataccgtgaacaacgccaccgcagctgctgcggcggtgatagtcgaaataatcttcttgcaaatcatcatcgaggcatgattgtagcacacaggcatgcatcttcgcctgaaaacattcatgataggaaatcacgccatatcggcgacatcacggaaaaaccggcaatcttcacacgaccggcgcgacactcccgggagaataatagagatgaatctcactggcggggaccgaagatccgccgaaaatcagtagtggatgtactggaagtcgttcacgttggaaagggtgcgggatgccggcttgccgttcagcgaagcgccgcactccgagacggtgaccgtgccgtcagcgttgatgctctccacgatggcgacatggccatacacggaactcgcgccttcctggcccgcgcggaacaccatgacgtcgcccttgtggcgaggcgtgttgtccacccagtagccgtgcgcacgagcggagttcgcccagtcctgaccattgccgaaatatgatccgacgggcaggccgagctgatggcgacgcaggtatgcccaccacgtgcactggctgaacgcataggcgagaccgctgtcgcccgtggcatggttcgggttgaatccttcgggcagcttgccggcatcctggtcgaccagcaccgcgacctgcgggttgttcgccagggagcgggacagctggctcacgtcgatggcggagttcttgtcgttcagctcccagttgccgttattggtggtctgcacgaatttggcgtcggcgatcgtgttgctcgtcttcgcgtcggccgcgccgctcgtggccgcggctgcggtctggtcggaggcgatggggccgagctcggtacgggattcggaacgcgagaccgtcgaaccggtcacgcgggccagctgagtggtcgtcgtggcgggatcgtcggccagcagacgagagttggacgactgctggatattggaaaaggccaaggcggtggccgcagtgccgaccagagccgcaagggatgcggatgacatcatgtacgacttgcgctgcgcggccttcgcggtctcgcggatggcccggcgggtcatcggggcgacctcgttcagcttggctgcaaaaacggggtcgatggcgagcgccacggcatcgccgttggccgcctgcacggcacgcacggccctggccgtgtgggaaccccgggaggagcggaataacgccgaggggctggtgcgctgaacggaatccttattggccttatgcgcagcatgcctcatactttttgctcctttaatatcatcgcgatgcggccttccgaagacgccgcacgttcatcacggttgaccagcttaccgcggggtgcggccatcggcaacccgaccgcatccgacacatgaacgccggctcctatcaatccgcatcattggctagtgttgagcatatggacaatatcgtgaacatcccgtcctcaatgaagcccgaagacggacgattcggctccggccccagcaagatccgccccgagcaggtggacgcgctcgaacgcggcggcaagacgctcctcggcacctcacaccggcagacgccggtgaaatccctggtcgcctccatccgtgaaggactcggctcgttcttctccctgcccgacggatatgagatcgcgctcggcaacggcggcgcaagcgccttctgggacatcgcctgcgcgtcgctcatcgccggcaaggccgcattcggcacatacggctcattcagcacgaagttcgccaagtcggcgcagagcgcgcccttcctcgacgaccccgtcatcttcgcgggagagccgggcacctatcggctccccgagcgcaccgacggcgtggacacctacgcgtgggcgcacaacgagacctccaccggcgtgtcggcaccggtgcggcgcgtggaaggcagcgacgagcagaacgcgatcgtcgtggtcgatggcaccagcgctgccggcgcgttgccggtggatgtcagccagaccgacgcgtactacttctccccgcagaaggcgttcggctccgacggcggcctgtggatcgcggtgctgtcgccgcgcgccatcgcacgtgcgcagcaggtcgagggcgaagccaagctcgaaggctcccgccgttgggttccgccgttcctctcgctgacctccgcgctcgacaacgcacgcaaggatcagaccctgaacacgccgtcggtcgccacgctaatcatgctggaggaccaggtgcgctggctcaacgagaatggcggcatggcctggtccacggcacgttgcgcgcagtccgccgcgctgctgtacgagtgggcggagcgcagcgaatacgcccggccgttcgtcgccgacccgggctcgcgctccaatgcggtcgtcaccgtcgacctggatgacgcggtcagcgccaaacaggtcatcgccgcgctgcgcgagaacggcatcgtagacacgtccggataccgcaagctcgggcgcaaccagctgcgcatcggcgtgttcccctcggtggagccgtcggacgtggccgcgctcaccgcgtgcatcgattacgtcgtcgagcacctgtgacggacgcggcagcaagagccgcccgatcatcaaggactgaacgctcgggcgggtgccggtgtatgtaccgccacccgcccgattcatcccatgcgctaaggtatataggtatgaaattcgcagccatcatcaatcctgaagtacgcaagccggcaccgaaaccggtgcgcgtcgacctgcgcaagacgttcctcatcggctgcgtgctgtggtcggtcgcgctgatcgtcagcgcgatactgctcgcgtgcgggctggatgtgctgcaattgctcatcatgtgcgcggccggactggtcatcggcgtcatgatgctggtatgggagcatttcgaccgctgggattaccggcgtctcggcaactgagccgtatcagtcccccaccggcagcgacagcgtgaacgtgctgccctgcccgggagcgctccacaccgtcacatcgccgtgatgggcgagcgccgcatgcttgacgatcgccaatcccagaccgatgccgtcggtcgtgcgctcgttctggttggaaccgcggtagaaccgttcgaagatacggggcagatcggccttcggcacgccctcgccatgatcgatgacacgcaccacggcgttcttcccgtccggagacagggcgacggagacgccgaccgccccgcctgggtgtgaatacacgatcgcattctccaccatcttgcgcacggccatgcgaatctgatcggcctccccgtgaatcatcacggggctcttgccgccgacccgcacctgcaccccggcatcccgcgcagcgccggcaagatcatccacggccccggaaacctgcgagaacaggtcgcaacggttcgcctccgaagccgtcaccggctcctgagccttaatcagcatcagcaggtcagagatcatgcggtcgagccgcacgcaggaatgccgcacctgccgcgcgtggttcgccagctgctcgtggctcacgtccgcgctctccaacgaatcggccagccgctccagcgcgcgggtcggttgcagcagctgttcggagacgttcgatatgaacgagtctcgaatctgagcgaaccggatcgactcgctgacatcgttgatcagcacgagcaccagatggtcgccgatgcgtcccaccgtcaccttcagccagttcggccgagacgaggcctctgcggtcaggccgtcatcggcagccgcggcaccgaatccgttcatcgtcatgaactgctccggcgtctgagtctccaggtcgaacgagcaccgggaaccgtccttcatcaccttgtgcaccgcgtcaagcaacgtaggttcgatcagcgtgtcatcacgcaccaagccgagtctataggccgcaggattggcacggaccacctcgtcctgatcgtccaccacgaccgacgccagcgagagcatcgacagcaccagctgggtggagtcatccagatcatcggccggctcgtcatcctcctgacggcggcgcgcgccgcgacgccgagactgcaacgacggcaagcggtcattgctgcgcagcgcgttcatgatgacgggctgcagccggtccgcgatgaaaaagccgattcccgccaatgcggccagcgccaatagcgcgaaaactacaaaaatccataccgacggctgaaactgaggcatggttccattgtctcacaccgagaggcgacatgcggcgaacgtgaattccgggtgaactagccaatgaattttgagacaatttcaagaacctgaccgccaagcgctaggcaaacacaacttatgcggcttacacttgatagaggttccatcaagagcaactacatagcatgaaaggctacaacaatgcgcgttatttttgacgaggagctcaaggccgttgccgatgacctcgatcgcatggtgcaagacgtgcgcaaggccatcaacggggccggagacgccttgctgaagcaggatatcgaagccgcccagagcgtcatcgacggcgacatcgagatcgatgccctcgaatccagcgtcatcgaccagtgcatccgtctgctcgccaagcagaacccggtggcgaccgacctgcgagtcgtcgtatcgacgctgcggctcgccgcgaccttcgagcgcatgggcgatttggcgaagcacatcgccgaagctgcacgccgcatctaccccgaaccggcgctgccggccgaggccacggagctgttcaccgagatgcagcagttcctgtcgatgaccgccgaccgcatcgtcgtcatgctgcaggaccgcgacgccaaaaccgccgaggagatcatcctcgacgacgacaagctcgacgcgctgcaccacaagaccttcgacctggctctgtccgacaagtggaccggcagccgtcagcagctgatcgacgtcgtgctgctcggccgcttcatggagcgtctcggcgaccacgccgtgtcagcctcccgccgcgtcgtgtacatcgtgtccggcttcgatccgagcaaggagccatcgcgcgacgaggacggcgccgtcgagtgacgacgaccgcggcgatgccgtcaccggcattccgccataactgaacttctctccacggagagtcccatgaacggcgagacggccacggctgctcgccgtttttgtatgccccgacgggcggtgcgcggcttggaacccggatcatagactccatcgcgacgtcaccgtgcgtgagttgcgtcaccgcgcgcgccctcgcagcgtggcaccccgcacgagtcacgcttcgctgcgctcccagtcagcggaagcgggaatggtgcgaatcggcgagaagacggacacgaccatgcccgccgtggccagcgcgcacaccacggcggcgatcagcgtgaacccgcccggcacgaaccgcaacacgccgccgaccacgaccggtgccacggcgccgaatacgccgagcagcgtttcgcataccgaggagacgccccctcggcctacatcacacacgtcggctcgtggccggatacgcaaaagggccgctcccatgagggaacggccctatgcatcaggctaatgccgggtcagagaatcacttctggccctgagcggcgacggcggcggcaccggcggcggcggcctccgggtccaggtactcgccacgcggcttgaccggcttgaagttctcgtccagctcgtagagcagcgggatggcggtcgggatgttgaccttggcgatctcgtcctcggacaggttgtcgagcatcttgacgatggcacgcagcgagttgccgtgggcggcgatcagcacggtcttgccggcgcgcagctcaggctcgatggcggactcgaagtagggcttgacacgctcgacgacgttggccaggcactcggcttccggaaccgggtcaccggcgtaacgcgggtcgtggttctgcgcgtactggtcgttcgggtcgatctcgggcggcggggtcgcgtaggagcgacgccacagcatgaacttctcgtcaccgtactcctgacgaatctcggtcttgttcttgccctgcagagcgccgtagtgacgctcgttgagacgccagtcacgctgaaccggaatccacaggcgatcggcggcatccagtgcgatgttggcggtgttgatggcacgacgcagcagggaggtgaagacgatgtccggcaggacgttcttctccttgagcagctcgccaccacgcttggcttcggcttcgccctgctcggtcagcgggacgtccacccagccggtgaactgattggtcttgttccatgcgctctgtccgtgacggagcagtactagtttgtaagtcataactcgcagtctaccgctcagcccggccaaattcgagcctttgtccaccgtttcgccgaacacttgcgcaggaatactcacaccatcagcgaaatcagcaggatgacggcgaagaacgggggctggaagcaggcgtccgacagcgctttgcggaattccttacggcccgtgctggttaccatgcgccacggcacgccgatgccggacagcatgaggatgccgccccacggcgtccacagcagcatcaccacccacacgccgatcgcccatgcgacgacgcagcagacgcccagcatcacgcgggcgccacgctcccccatgcgcactgcgagcgtgcgcttgccatgccggcgatcctcgttgatgtcacgcaggttgttcaccatcagtatctggcatgacaacagccccgcgacgaccgcgcacaacacgccgagcacgctgaccgaaccgctcagcgcatactgcgtgccaagcacggcggccaaaccgaagaacaggaacaccgagagttcgccgaatcccgcatatccgtacggatgcttgcctccggtgtagaaccagccggccagcaggcaaagcacgccgaccagcagcagccaccacgcctgtgacaggacgacggcgacgaggccgcacacgcaggccagcagagcgctcaccacggcggcgacgagcacatgcttcgccggaaccaggccggacgcggtcagccgcatgggcttcttggtcttcttctcactgccaccgcggccctcatcgacaccgcggatgccatcggaatagtcattggcgtagttcaccgcgatctgcagtaacacgcccacgcacacgcacagcagcgtgacgagccagaaccgagacatcatcgcctgcgcatcggcggtgaccgccgcgcattgcgacgtgtcggaccgggtctgcgcgcagttgagatcgcccacgatcaccggatacgcgcagcatgcgcccaccaccacggaggacagggaggtcgtcaaggttttcgggcgtgcgccggatatccacagtttcacagtcatgcagtccagtgtacgtgcctttcacggattccgtggatatgtcgtcatgatcatccgccgacatcagcacgccccgctggcggggggggctgtcggcacagcatcgatacataacaggcggggctccacgcacacacgcgtggagccccgccatatcatttcaatcggtcatcgtccgcagtccgcacgcaaggccggcagcgacccgccgcacgtttactgcaacgccagcggcttgaccagcgggaaggtgatggtctcgcggatcgtggcaccggtcagggcgatgagcagtcggtcgatgcccatgcccatgccgcccgccgggggcatgcccacgccgagggcctccaagaagtcctcgtcgatgtcgcaggcctcctcgtcgccggccagcgcgtccttggcctgggccacgaaacgctcgcgctgcacgatcgggtcgttgagctcggagtagccggtggccagctcgaagccgcgcacgtagaggtcccacttctccaccacgccggccttgttgcggtggcccttgaccagcggggaggtctcgaccgggaagtcgcgcacgaaggtcggctcgtatagcttgtcctcgtagaagtgctcccacaggtgctcgacgagcttgccgtggttctcaacgtcgtcacgctccacgccgagcttgtcggcgatctcgcccagatgctccacggaagtgccggggttgtccggcccgccgttcggcacgatctcttcgccgagcgcctcggagagcgaatcatacatgctgatggtcttccagtcgccgccgaaatcgtattcggtgccgtcgagcagcgtgaccttatgggagccgaacacgtccatcgcggtcttctgcacgagctccttgaccagctgaccgatggtgtcgtaggtgccgtacgcctggtaggcctcgaccatcgtgaactcgggggcgtgcgtggcgtcgacgccctcgttgcggaagtcgcggttgatctcgaacacgcggtcgatgccgcccacgaggcagcgcttgaggaacagttccggcgcgatgcgcagataaaggtccaggtcgaaggcgttcatgtgcgtggtgaacggacgggcggcggcaccgccgtggatagtctgcagcatcggcgtctcgacctcaaggaagtcgtggtcatcgaacgtgcggcgcagcgaggcgacggccttggaccggttgcgcaccatgttgcgcaccttctcatcggcgatcatgccgatgtacggcttgcgcgtgcgcgtgtcgtcgttcaggtccttgtgcagggcgggcagcggctgcagcgccttggacgcgatggcccattcggtggcgaacaccgacagctcgccggtcttggacgcgatcacgcggccgcgcaggtacaggtggtcgccgaggtccacgagctgcttgaactgcttgagcgagtcagcgccgatctccttcttggagatcatgccctggatcttcgtgccgtcgccggccgacagctgcacgaagcacaggccgccgccgttgcgcagaaacaggacgcgcccggcgatgccgaccacgtcctcggtctcctgaccggcttcaagcttgccgtcatacttggcgcgcacggcctcgatggtgtcggtcacgtcgaggtgcaccgggtagggctgcatgccggcctcaagcatcatcgcgcgcttggcgacgcgcatctgcacctgctcggggtgcgcgagcggaccgaactccttgttggagggatcgacggcctcgtccaaagttgcgccggcgccgatgcggtcgcggatggctgcgtcctgtcgcagcagcatctcggcacgttcgaccgtggtcatgacgggaacagcgggcaccgtctcgtcgtcgttcagggatttgggggtttcttgcgtctgactcataatgtcacagtgtaatgagatggcgatacacgccgagagtccgttgatattccgcggttttcgggatgccacgccacgccggtttggcttgtccgggatttcgttgtattatagcctgcgttgccaaaacgggctgtagcgcagcttggtagcgcgcttcgttcgggacgaagaggccgcgggttcaaatcccgccagcccgacaacatgaaggccagatcgcgtcagcggtctggccttcttcttaccggtggcttggcagctcccgcagtctcacactgcgggaccaccacaaccatcagcgacaatcacaacaaacgacacccacgcgcgggcacgcccgcgagatgtgatgaagagggaaccatgaagaaaagcctgcttgccttggcttccggcgcgttcatcctcggcgcggccgaattcgtgatgatgggcatcctgccccagaccgccgaggcgatgcacgtcgatatcccgaccgccggccatttcatttccgcctatgcgatcggcgtgtgcatcggcacgctgattctggtgttcgggcgcaagatcccgccgaagcagctgatcatcatgttcatggcgatcgccttcgtcggcaacgccctgtcggcgttctccgccaatgcgcccatgctgctggctgcccgtttcatctcgggactgccccacggcgcgttcttcggcaccgccacgctgatcgccaagaccgtggccgacaagtgcaaggaggcgcaggccgtctccgtcatggtcaccggtcagaccgtcgccaacatgatcggcgtgccggccggcacgctgatgtcggagttcctgtcatggaggcttgcgttcatcgtgctcagcgtctgggccgcgatgaccgtgttcctcgcgcttgcctgggttcccgccatcgcgccggtgaaggacgtcggtctggccggccagttcaggttcctccgaaagcctggaccgtggctgattctgggcgcggtgttcaccggcaacgccggcgtgttctgctggtggagctacgtgtcgccgtggctgcagaagaccggcggatacgacagcgacatggtgccgttcctgatgatgctcgccggattcggcatggtggtcggcggcatcatcggcgggcgcatcaccgacaactggcgtcacgcgggaaccgcagccctcgggcaggcgatctccggcgtcggtctgctgctggtgttcctgatgcccggcaaccatgtgagcgccgccatcttcacgttctggatcgcgttcggcctgttcttcatctccgccccacagcagctgctgatgaccgaatccggcaagggcggcggcgagctgctggccggcgcggccgtgcaggtggcgttcaacttcggcaacgcggtcggctcgatggtcggcggcggcatgctgaacttgtcaggcatgaactaccacttcaccgcattgggcggcgtgccgttggcggtcatcgcggtggcgctgctgaccatatactccatgcgtcacgagacgcacaccgacgcgctggagcgtatgcgcgagatcacggtgtgagtttcgcgggatataggctctcaaaactcgcagatacaagtggaatttcgctgaatcaccggtatatctgcgagttttgagagcgggggtttgttatatagctcacatcacacgccgaaaacgtcatcaccaaggcttcctagactggtagaaaccggtttcatggcaaggagatgacatggacgatgatgcactgatggcgaagctgatggccgcgttcgacgatgacgcggcaccggaccaagccggggacgaaccccgaccttccgagcagccttttgacacgcaacggttcctcgccgggctcgacgcgatcttcgacgcgcacgccgccgccaaggcagggccgtacctggagcaggccatgatcgacgcggagaacgccggcgatgacgccgggctgctcaccgtgctgaacgagacgatggggttctaccgctcgcaaggccgacacaaggagaaccagtggatcgtgcaacgggcgctggagctcgcgacccgtatgggcatcacgggcaccgaggcatggacgaccaccctgatcaatgcggccaccgccatgcgggcggccggccagtacgaccagtccgaggatctgtacaagcaggcgcaggcgtccagcgagcgcacgctcgcccccagcgaccggcgactcgccgccctgcacaacaacctgtcgatgctgtacagcgagaccgggaaaacgcatcaggccgaggtggagctgggcgaggccctgcgcatactggaatcgtcgagcccggatgccgaaaccgacctcgacgtggcctcgacgcacacgaatctggcgttgacgctgctcgccgaagacaagctgtccgccgcgagctggcatgcggcgaaggcgttggagatctaccgcaacggtcatcttgagcacagcgcccattacgcttcggcgctggccggctacgcgcaggtgcgttttcaccagcatgattacgggcaggcggtgaacctgtactgccaggccctgcaggtcatcgaggaatgctacggcaaggacactgattattaccgcatcaccgagagcaacctgcggcaggccgaacacgaggcctccgagcatgcccccgcgaatgtttcacaggatgtttcacaggatgcgagcgcaggtgggaatggttccggcacgcccggcgcagcacccgccggcaccccatccgccgccgttccgtccgctaccgcctcacacaccggcacctcacccatatgcggcctcaagctggcacgcgaatgctggaacgcctatggcaaaccactcatcgccgacaaatacccggaatatcaggggcgcatcgcggcgggactggtgggccacggatcggaatgctacgggttcgatgacgatctctcgcgcgaccatgatttcggcccacgcttctgtctatggctcaccgacgaggattatgcggcgatcggcgagcgccttcaggccgattacgaggcgctcccccaatcgttcatgggatacggcccgcgcgagtccaccgccagggctcagggtgcaggcaggcgcgacggagtgttccgcatcggcgatttcttcgagtcgatcaccggataccgtcaggcgccaagcaccaacaacccgcacgagtggctgatgctggatgaggcgacgcttgccgccgccaccaacggcgaggtgttcgccgacccgttgggcaagttcctcgacacccggcaggggttcaagaccatgccggaggacgtgcggctggcgctgatatccaagcgtctgggcatgatggcgcaggccgggcaatacaatgtgccgcgcatgctcgcgcgcggcgacggtgcggccgcctggctgtcgatcggcgagttcgtgcaggcggcggcatcactggtgttcctgctcaacaatccgatcaccgtgggatacctgccgtattacaagtggcggttcgccgcgcttcggcggctgtcgtcccgcatggcgacgaggctcgccgatgtgtgcgggcagctggagacgctgctgcggctgagctccgccgcctgctatggcggtgccggtttcggcgagggcggcaaggggtcggcaccggtcgccgagaagatatcccagaccatcgagcacgtctgcgccgaggtcgtggccgagctgcgccgagaaggactaaccggcagcgacgagacgttcctggagtggcaacggccatatgtcgaggagcacatcgccagcgacgcggcttgtctgcattccctgtgacagggcgtgaccggcacgggagatgacggcggcaacgacgataacgaacaacgggaaagagacggcggatgagcgaccagctgatcgagcggatagtgcgtcatgaatgggatcagttccagcgcacgaacaacgagggcgggcgggccgcctgccaaggcaattggccggtgttccggcagatgcgcacgagccagttcatgacatggaccgatccgctgctggacagttatctggccgatctggtcgaagccgagcgcgtcgggcgcaatctggtcacggagaagtacggtcgcatgatggagtccacggcaccgcaggatttccatgacaacatcgaaccgtacataccccggttgagcgacgaacgtatcgcgacgcaggagcatgtcatcgcaacgcaggtggcgtgggccgaggacttccgcgcccgctacccgaaactcggccgggccatgcgcgtgctgcgcaccgcggaggacaccgcgcaatccacgtcgttcgaaacatatctgcgcggggagctcagcacctactcggaacgcacgatggccctgtaccggcgtttcgtcgacgatctgctccggaagggtcggaacctgaacgaggagacgatcgcccacaccgtcgccctcgctggtttcgccgatctcgccgaagcggaggccgcacagggctgacgcgggaatcggtgccttaccggcagggccgccggcaaggcaccggtcgatatgtcactcgccatggggcgttcgcgcgttgcgcgctatctttgccagagaccagatgatggcgatcaggatcagcgccccgccgaccaccgcgcacccgatggcgaacatcacgcggggatccatatcgaaccatgcgagcacgccattggggaacctcactccgaacaggatcgccaccgcgccgaccagcagcatgaacacacccaatgtcagtgtggcggcgctcggccctgtcttgcggatgaccggacgcaccggcacgtcccgcggcacttgcacgtaattggagcccgcgcccggctggacccagggaccggccggagcggcgtatgcaggacccgcatccgggcggttcggtccgtatccgtcatgctctcgcgggggctgcgtgctgtacagcggaatctgctgaggtgccggaccaggctgctctgtatcacccgcggcgaaggccgtggcggcatcaggctgttgcgtggcgcccgcgcctgtggatggcgcagcggcaagaggctgccctttgtcaggaacatcgccggccgttgtgactccggccggaacatcgccggttcgccgatcggaagcggcggcgggactcccgaatgcgtcggcggcaggctcggtctcggtctggccgtcatccacgggggccgccgattcgtccgaaaccgccccggccgcaagtggttcggcagacaacttctcggtcaacgcggagtcaaccggcaacgacttggtctcggcctgcggcaccgcgaccttttctaccggcatcgcctctgtctcggcaaccggcagcgtctgtgtcggctcgaccggcaacgcctgcgtcggctcgaccggcaacgcctgcgtgacggcagaagcctgttcggacacgccgccgaccagtgtcggcaaagcctcggtctgctcgaaatccgcaggcatcgcctcggcattcggaagatgccgtgtcatatcgtgatcgtcattcatgatgtgctccttgtatcattcgtccgcagtgctcacagggcgtcatcggatgagcatccgccgctgtcatcgacataacggacggccactttcccctcgatggtgtacggcacgttgatgatcagttcgggcccgccttcaggaatggtgctgtaatcgaggttggatgcgccgccgtcgcacgccggcttctcaccggaacggcccgagaacgtgttgtccaggcgcaggaaatcgtatccccactggtttctggtgatcgtataccggcctccgatagaaccgacgagccgatacccgtcgctgcgcttgccgaacgcaaagctgcatccttgcggcaaagtcagaatcacccgggcccgataggccgagatgcgcaggtccccgaccggacacgtcgattgcctgacctttccgtcgacatccgtcaccttgtgggggctgatgccgggcacgccatctcgcgtcagatctatgctgacgcggtcgtcgccgtaattcgtgccgacgaaccgcacgccctgttgcaatcgggcgatctgctgatcggtggcgccatatttcgtgactccgtgaacattgaccagcgtgccgccttcggactgcatggcatccaccgtatagctgtaagcgacgttgacgcccagtacgcagaccgcgacgaacgcggcggtccaggcgagcggaatcaggcctccggagcggcgtcccatcaggccaagcaccgttatgacagcacccagagccaggcagacgccgccaatccacagcgtgagcacacgggtcatcgattcgatggatgagttgtcgtttgccagcatcagaaccgcactggagacgagcatcagcccgatcatgccgatgacgatggcgaaaccggccggcttgcggcgctcgtatttcggtggaagaggccccgccgatgggcgatacggagacgactggtacggcatgggaggacgtgcgggccgatcggcggtatggggctggccgaagccgtatcccggagcgggctgctggaacggctgacgcaccgacgctacggaggactccgctgcacttcccgcggtttccggcgcggtgggccctgatgagccagccgtgccggcatcggccgcctgctctcccgtgtccgcaccatcataggcgtatgacgaggccggccatccgcgccggtatgagccgttctcagaatcgccggtaccgctgacgccgctgcccgacccgtatccgccatgccgccggttggcgttctgcaccagggcccacagcaccagcgccgcgcacagggccgccgcgagaccggcaccggggacggcgaccgccagcatcatcatgattatcacgccaagcatgttccaatcccagcgcccgtcgatcagctcctcgccgaggatacggccatcccgcgcatcgggcagcagcgcccatgcgatggcatacagcgccaaaccgaatccgcatagcaccacgctcgccagcaccagtgcccgcaccagagtcgggctccatcccacgcgctgcgcgatggcgctgcacacgccggcgatccaccggtcgtccccgcgctccatcgcgctgccgcggatccacgagaagaaccggtcgctctgccgcttcggcttcggctggggtccgggcgcaggagagacgtacggatttgaaccgtacgaatccgaaccattcgtgccggggccggcggcgccacccgcgtcataggcatacgttgtatcgttcatgcttccattacagcagcaaccggccgccgcacgcatcgggggacaccctgattgttccctgaaccggggcgttatgccccatgtcgtcttccccggaggcgcacaatgggaccatgatccagccgaacaacccataccggcagccgcacgcgccccgtcggacgcaatggcaggcccgccgcgcccaaccgccgtccgccgcgccgagcctgccattgatgcgcccgcggaacgggcgcgtcctcgtcggcgtgtgccgtggcgtgagcctacatctgggagcgcccgtatggctggtgcgactcgcgttcgccgcggccgctctcgcgttcggggccggcgtcatcgcatacgtgttcctgtggatgttcatgccggtcggcgatcccgtcgccgccgcgcaggccatgtcggatgcggcctcgacaggtttcgccgagccgctctcccgcggtaatgcggcatacgccggcaccgcgggtgacagtggccgcagcgacgccgacgactcctcggagggactggcggcggctctgcgccgcgccccgaaaccttcactggtggcattggccggtctggtgttcatcgccataagcgtgctgctgtcgtttgccggcggacgggagctgatcgtgccgctggccgtcgccgtcggcggcctcggactggcatggtcgcggtttgacgcggacgagggcaaactgccatcgatgcttggcggcatcgtgcttctgttcgtcggctatgcgatcttcgtgttcaccagcacggttccggggtggggcgcgtcccctcgccgcatcatcatcggcgggttcgtactgctggccggcacggctctggcgatcgtgccttgggtgagcacgctcatccgctccctatccaccgagcgcgcactcaaggagcgtgaagaggaacgtgccgacatgaccgcgcacctgcacgatggcgtgctgcagacgctcgccctgatccagctgcacagcgacgacccgcagaccgtgttctcgctcgcccggcagcaggagcgcgaactgcgcgaatggctgtatcaggaacgcaccacatcggaccgttcggtcagcgccgggctgaaggccatcgccgcgcagacggaagacgagcacggcaaaccgatcgaagtggtgaccgtgggcgacgcgaggcccagtgcccagaccgacgcgctgctcgatgccacgcagcaggcgctcatcaacgccgtgacgcatggcggcgagcccatctccgtgtattgcgaggccggcgccgacaaggttgaggtcttcgtgcgcgatcatggcgatgggttcgacgtgaacgcgattcccgagggccggctcggcatccgcgagtcgatcatcgggcggatccgacgacggggcggtacagtggagatcgtatcgaggccgcattggggcaccgaggtgcgcatgcacatgccggtcgcaggcggacggcaaccgaaccagcggggcgatgccacgaacgccggcgggcagcatggacgaccgccatccggcgcggcatcatacacacgcacgcagagggaaacatgattcgacaggtgaagcatatgggtcaggcagacagcacaagcatcggaccgacatcaggagcgaatgcgaggcaaggggcggccggtgagttcggcagcgtggagtgcaacgacgtggagtccggcagagccactgatacggataccactccccgcgaagctgcggcgacgccgattcgcgtggccgtcgtcgacgaccatgagatgttccgcgccggtgtcatcgccacgctgcagccgtacttccacatcgtcgggcaggccgccgacgtggaaggctcgatcgcgatgatcgccgacatcagaccggacgtggtgctgctcgacgtgcacgtacccggcggcgagggaggaggaggcgcggagatcctcgccaaatcgcagccgctctcccccgcttccgcgttcctggcgctgtcggtgtcggattcgccgcaggacgtcggctcggtgattcgtgccggcgcacgcggatacgttaccaaaaccatcaccggcgacgatctgatctcatccatcaagcaggtgcacgaagggtatgcggtgttctcgccgaaactggccggattcgtgctgtccgccttccagggggcgccgatggacggggccggcggcgcgcggggccgcgacgaggagctggacctgctgtcaggccgcgagcaggaggtcatgcgcctgatcgcccgcggatacacatacaaggaggtcgccgccgaattgttcatctccatcaagaccgtggagacccacatgtcaaacgtgctgcgcaaattgcagctgtccaaccgcactgaactgacccgctgggcagccgaccgcagcatcgtatgaggcaaggcacgaccggcgcggcgacattcccatgccgacggtgaaacggacgccacccacgtagagcgttcttcatacactggtaacgaacacaaccctatcctcgtcggaaggaaacagcatgaccgctgaagcaaacgtcggtgtcgtcggactggccgcaatgggagcgagcctcgcccgcaatctcgcccgtcacggcaacaaggtggcggtgttcaaccgtcactattcgcgtaccgagaaactcatcaccgagcatggcagcgagggcgagttcttccccgcgaagacgatggaggaattcgtggcatcgctgaagaagccgcgcaccgcgatcatcatggtcaaggcgggcgagccgaccgacgcgatgatcggccagctggccgatctgatggagccgggcgacatcatcgtcgacgccggcaacgcgcacttccccgatacgatccgccgcgagaaggcgatcagcgcccgcggactgcacttcgtcggctgcggcgtgtccggcggcgaggaaggcgccctgctcggaccctcgatgatgcccggcggcagcgaggagtcctggaagacgctcaagccgatcttcgagtccatcgcggcgaaggccgagggtgagccgtgcgtgacgcatatcggcgagaacggcgctggccatttcgtgaagatggtgcacaacggcatcgaatactccgacatgcagctcatctccgagagctacgacctgatgcgtcgcgcgctcggtatgacgccggctgagatcggcgacgtgttcgaggagtggaacaagaccgagctggagtcctacctgatcgagatcaccgccgacgtgctgcatcaagtcgacaagaagaccggcaagccgctggtcgacgtgatcgtggatcacgcgggcatgaagggcaccggcacgtggaccgtgcagtcggcgcttgatctggccgtgccggtgaccggtatcgccgaggccgtgttcgcgcgaggactgtccgggcaggccgagcttcgcgccgaagcccagaagcaggacttcgagggaccgtccggcgtggtgccgatggccgaggaagacaaggtcgcgttcatcaatgacatccgcgaggcgctgtacgcttcgaagatcgtcgcgtacgcccagggcttcaacgagatcaccgaagccgccaaggtgtatgactggaagatcgatctggctgcggtggcgcgcatctggcgcggtggctgcatcatccgtgcaaagttcctgaaccgcatctccgacgcgttcgagaacggcgaagccaacgtgtctctgctgttcgccccgtacttcaaggacgcgatcgagaccgccgagcgctcgtggcgacgcgtggtctcccgtgcgattacattcggcatcccggtgccggtgttcgcctcctcgctggagtacttcgacggcctgcgctccccgcgcctgcccgccgccctgatccagggccagcgcgactacttcggcgcccacacctaccagcgcaccgacatgcccggcgccttccacacgttgtgggccgagcctggccgtgaggaaatcattgcgtgatttccggtgacagccacgaggagacaccgagcctcgcgaagcgagaccacaatcgtaggggccgaaggcgagcctggtcataagcaaacaccgagcctcaccacaagcccctccctaccgctcgcagatcgaacgcgaaccatacgaatgatggcgcaggctcccctaggggcgtctgcgccatcgtgtttcatcggcacaccattcatatcgtgtggttcccatttttcacacagacgtttttcgcgcacagtaatcgcaaccagccgcatcccaacatcaccaatcaacgcccagtcaccgccggcggtgcatatcctcctgtacaacgcgcgcattatgccatttcgcgggagttgtacacgcatcggcgtcgcaaccctgcgcgcttcttgcgctgcatcccattcgcatgccggaccgcaccccgggcacgcaatgaaccctcgggcggaatgaacgaaattcgcaatacgaccggattgtccagtacgatcgtcgaaccgcatcgccatgattgacagaccggactcaatcccatgccatgatgaacaccaatcagatctgatttcacgacgggagacgtggcacgaaacggcaaaaccgtgcatctttgccgtttcgtgccacggaatcctcgaattgtctcgctatccgaaataacaagcttcaaataccgaactatccgatagtcgagacaaatctcacagcttgccggcggcgtcctggtcgatgtaccagatgagttcctcgccgtcggcgaaggagctcggggcctgcggattgcgcggctgggcgaaggcggcggcgaccgcatcggccttgcgctccccggacgcgaacacccacgtgtgccgcgaacgggcgatcatgggaacggtgagcgtcacgcgcagcggcggcggcttcggcgaatcgcgcacgccggcgaccagcacatgcgggtcgtcgatcagcacttcaggccggccggggaacagcgacgcgaaatgcgcatccgggccgacgccgaacaacgcgatgtccagcgtcggctcctcccccagctgctcgatcagctccttttggtaggcggcggccgcatcggccagcaccgcatcgttctcctcgtcggtggctgcggcgatccgtgcggcgtcgcgcgtgtcagcgggcatctcgtggatgttctcctccggcatcagcccgcgctccaccaggatgttcaggaaccgccgcgcctgcttggcgttgcggtcgtcgctgtcctcgggcacgaaccgctcgtcgccccaccagatgtgcacgcgcgaggcgtccaggtcatcggccagcgggtcggtgccgatcgcgcgcagcacgcgattgccgtcggtcccgccggtcagcgctatatccacgcggctgcgccccggttcggcgagcaggttcctgatcgtggtcagcacgcgcacggccacagcttgcgccagaacatcggggttcgggcatgttacggtttttctttgcgacatcagttacagctcctttgtcgttctgattcggtcttcacgcgtccgaaacccgcgcccgggcatgggcgcgtgacggttccgtgacgctcacgcatcgtcgttcattcgttgattcaccgattgccgtcgggccggcgccttgcggtcgagacgccggcccgacagtgcttattcggcaggatgaatcagattccatccctgagtgatgacttcagcatacacttcatccgggtcgagctgacgcagctcttcgctcaggcattcctcaagcgtcctcgtgggcacgctgatggattgcggcgactggccaggcgtgctgatgacggcgatgccctccttcgcgtctggccgctccagactgagcgtcccgtccgcgcgcgtcaggtatacgccggtcacggcggtcgcgccgggcacctcctccatgatgacgggcacgttgagcttcagccgcagccaggccgccagcaaatccatgggcaggaagcccttcggaccggagaccttcaccgtactgatcggcaggtgcggcggctggtcgagcatggtggcgagcatcgcacgccacaccgtcaggcgcgtccatgccatgtccacgttcttcggcgaccagttgcggcgcagatcctcgatggtgcggtaggggttcgacgagtgcatggcgtcggtgatgcgactcctcgccatcgcgccgagcaggtccttggacgggttggccggcgcctcgttcggccaccacgccacgaccggcgcgtcgggcacgagcagtgggatgaccaacgtgtcgggatgatggaccagcccaccacgcgggtgcagcacgatgatctcacccgcaccggcgtccgcgccgaagcgcacctgggcgtccagattggaattgtcgtacgccgcatccgcgtcctcggcgggcttgggcgcaccctcgacgggcttgcgcgcgccatttccacgccgcggggagatggcgatgacacggcacgggtgctcgcggctggcggcgttggccagttccagcgcctgctccagctcgtcctcggtggtggagatcagcagcgtcagcacgcggccggtcgccgactcgccgcgctcctcgtgcaactcgtcgatcttctgcgatatctcgcgggtgcgggtgttcggcatttcgataatcatggcatcctccagtggcgtccgtcgcgtgcgagcatttcatcggcctccgtcggcccccacgtgccggcacgatacggctgcggctgaccgagcgtggaccagaattcctcgatcgggtcgaggatcttccacgacaggttgacctcttcggtggtcgggaacagcggcgggtcgccgagcagcacgtcgagaatcagtcgctcgtatgcctccggcgagctctccgtgaacgagcggccgtagctgaagtccatcgagacgtcacgcacctccatcgccgtgccgccaggcaccttggagccgaaacggatcgtcacgccctcgtcgggctgtacgcggatcacgatcgcgttcttgccgagctcgcgtgtcgcggtcgactcgaacggcaggtgcggcgcgcgcttgaacacgacggcgatctcggtgacacgcttgccgagacgcttgccggtacgaagatagaacggcacaccggcccagcggcgggtgtcgatgtcaagccggatcgccgcataggtctcggtggtagacgccgggtcaatgcccttctcctccaggtatccgacgacgtcatgcgagccctgccagccggcggcgtactgtccgcgagcggtgtgtgcggcgaggtccttcggcagacgcaccgcggagaggatcttcgtcttctcggcggtcaggtcggaggcggtgaacgagaccggctcctccatggcggtcagggccagcagctgcagcagatgattctggatgatgtcgcgcgctgcgccgatgccgtcatagtatccggcgcggccggccacgccaatgtcctcggccatcgtgatctgcacgtggtcgacgtagttggcgttccagatcggctcgtacatcgcgttggcgaaacgcagcgccagcatgttctgcacggtttccttgccgagataatggtcgatgcggaacacgctcgacgggtcgaacacctcggagaccacacggtcgagctccttggcgctggccagatcgtggccgaacggcttctcgatgatcacgcgtcgccatgcgccctcggacgagcgggccagtccgcagtcggcgagctgacgcgccaccacggggaacgcccgcggcggcaccgacatgtagaaggcatggttgccgcgcgtgccccggtcgcggtccagttcagcgaccgtgtcgctcaaccgcgcgaacgccgcggagtcatcgaacgtcccctgcacgaaacggatgccctttgcgagctgcttccacgtcgattcgcggaacggggtgcggcaatgctgctgcacgtgctcgcggacgaaatccctgaaatggtcttcggtccagtcgcggcgtgcgaagccggtcagtccgaagctcggcggcaacaggccgcggttggcgaggtcatagatcgcgggcagcagtttcttgcgcgacaaatcgccggtcacgccgaagatcacgatgctgcacgggcctgcgatgcgcggcaggcgcaaatcgcgcggatcgcgcagtggattggtccacgcggttggcgtggcggaaacggaatcagtcatacgcaccatagtagtgatgcgcgtgcatctcatggcccattcctctcagaaagaaccatgcaatgcatcatatcgcgggattctggcgcggcgagaaccgctccgggaccaccccagtcgctacgcgacagtaccaagctggcgtcagagcgtgggctggtccgtctccccgctctgctcgccggtctcgccctcatcctcccgcagtccggattcgagtctccggttgcgttcgcggagcctgtcgttctccgcggtcagctcgtggatgtaccggatctgctgcgctatgagcatatcgcgcaggtccttggcctccgatccaccgaaattctcgcggatcgtggccgcgcgaatcggcgccggcggaatcagcggattgccggtacgcgggaacttgtcagcggatatcggctcggcgtcgtcatcagccggttccatcatcttccaacgcgcgatgcaccgttcgatgcgcttgtatccgataagcgccgggtcaagcccgacgtcgcggaatatacccgccggcgagtcccccgcacgataccgctgcatgcagtattcgcggaactggccggtgtatcggatgcggttccgtccgacgctgttcacggcaggcagtgaacgcaggtagtcaatctcgtcgtcgtcaaactctctgtctttcatgatggtgccctccagcactcttctcatcgatagagatgaacatgaaacggaggttcgccaggattcactgcactgtcttccccgcagtatcctccgaatcgggacgcccgccctgcctcgtgaaaggcaggcggatggccgagtcagccgccgatatgcgattcgcggcgtgcacgggtcatcatcggcgacgtgcctggcagccgtgtctcgcccaaagcagtcgcgacggatgtcaccgcggcgtaggtctccgacttcacagggacttccgagggttcgggggtgttcggcgcgtcgggggtggaggttttcagcacgggcttggcatcggccatggaatcgatcatgtgaccatcgacttcgccggtcaggatgacgtcgacgccattggcgatgtcaagcgttgcggccagagcgatgttggcggccggagcggcggatccggccttggcggcggtcagcggggcctcatcacccacgcgcatgactggggattgcgccttgtgcaccgcgtttgcggcggcggcatcgcctgtatatttgctggatgatattgataatcgttgcctgaacctgacgacgaaacgtcgattttcccgaaacatgatacatccttcacttcttgcttcgggagggttcatcctacgcaaaaagcgcaaaacaagcccccccccccgtgatttcgaagtgtagcgccagcgggaagatatttgggggactatgtttctaaggggttatgacggggagttacgggggtgtctttggcggcgcgatatggtcatgcaggagacccatatgtgtgcgcgagcacgtcggtatggccggtcaccccatacaggtgcccggccataccgcagccggtcaccggcgacgggagcgcgccgtcgtgatggagaatcccgcggcaagcatgatgcacgccgtcactgcgagcagcagcgtctgggcgcccgtcttcgagagggtttccgtgcccgccgtgccaggtttggaggtattggcattgccgccggcgccgggcttgacgccaccgggacgctcggtctgcccgccgctgccaggctgctcgggatcctcgccacctcctggttcctcaccgccgccgggctgcttgcgctccagcccgtcgcgagcctgagtcagggcctttacggccttgtccagatcgccctgcgtggtggatcgccgtccgcactcctcctgcgcggcggccaacgcctcggcgaacgccttccacgattcggcagtgtaatcgccttctctgagagcctgagccgacgcgatggcgtcggacaacgggccacggtccagacgcgcgtcggacagcgcggcgatggcatcattcagccgtgccgcaagggcgtccacgtcggactgggagatgtgcgccatgtcggtggctacggcggcggcaagagcctcgcgcatcgtcgcccacgcagccctgtcgtactgcgattcgaccagaccgttcgccgcccgcttcgccgcatccaacgcggccgcatcgatgtgcacgattgactcgttgaacgcggtcgtcgcctggcgcagcgcgtccgccgcggcgtccaccttatcggcgtctccggcggctgcaccgtgtgcggccttggcgtcgtcgatggcctggcgcagagcgtccgcggcgctttgcggatgctgcccctcgtattcgccgacgctgcccgccgtctgcgcgtcctccagcgtcttgaccgccgcatccagcacgacctgatagcgctcctgcgcgtcaagctgcgcgagcgccgtgtcggccgaccgccgcaacgcagccgcggcgtcatcgagatcctgttgcgtcaccgtgccgtaggcgtcggagacctgcttggcgcttgccctcgcctcggccaatgcggccgacgacgcgggcaggccatgcgcgtccagagacgcgatcagcgccgcggcgtcatcgatcgccacatacagcgcgttgcggtcgagcgacacgtagccggtgcggtagaactcggacaccgcgtcttcgacggtcgtcgtccaccggccggcctcgcgcgaggtcagtccggcgtccagcgccgcccgcgcccgctccagcacgacttcgagcttggtcttcgccgcccgggtgacgttgccggcgtattcgccgacggtgagcttgccgagcgcggtctcgacggacgagaggtagctttccagagacgcccctgcatccgcctgatacaggtacaactcgttgatggcgacggggttctcgttgagcacggtgatgcgtaccgcgtcggtgtagacgggccgtgcaaggcgggccacgatctccggcttcatctgcgcattgccggaatagtcggtcagcgtcttccactggtcggctgcaccatcgcccgcaccgccgccgtcctgcggcaccacgcggtattcggccttgaaccgcaccggctcgctgttaccggaggccagcaggccgagcatgttgatgtccgcggccttcgcgagcgtgaatgtcagggtcttgtcagccgtggccgtcaaggtggccgcgctgtcgcggtctccgtccgtcagcttggcgaggtcggcggccgtgagcgtcgagccgtccgaggccgtcgtcttggcgtcgcgagccacgttgccgggcgtcgcgtagacctcgatctcggacaccagcggccatgcgggcgagccgctggaggggatgcgggcgtcggcgatgtccatgcggatgcgtgtgatgctcatgccgaccggcacgtccatcacgatgccctgctgtttgctcaggtcggcttcggttcgttcggcgaccgtatgttcgtcgccgttcgcgtcgatcaccttcaacgtgaactgcatgctgcggtcgggctggccttcctcgaacttgagccgtatgctgtcgacctcacgggccttggcatagtcgagctggaaccatgccggcgtggcgccgtcgcgggacacccatgcggtcgccttgccgtccaccagcgcgcctgcgttctcgggcgcgtccttggtgggcgacgacgtgatggcggccgaggtggcgatgttcacgctttcgatggtgtcgccggcctcctgcagcagttcgagttcggcgagcgccggccatgcggtgccgccgaccgaccccgtgaactccacggtgacgtgttcgacctcctcgccaagattcgccgcatacacctgatcgagggcgccctggttctgcgtctcgtcgatcagtgtccgctcggtaccgtcagcgagccccgcgacgaccctgaactggaacaggcggccggccgtctcgaacacgagccgcacgcggtccacacgctgcgccgacgccaggtcgatccgataccagttcgggtcggacccgttgccgacccacagtgtaccgtcgtcgccgtcgttgccgttcgacgcgggccgctcgctggggccggcgcttgcggcgccgccgagcgccaggttcgtgtactcgggctgcggctgcgcggctccccagacggacagctcgtagatgccggtcaggtcccgcccgttcgtcgaatgcaacttccaacgcaccttggagccgagtatgtcggcggcgacctcgttcttggagctgacggcatcggcttcactgcggcctatctcgacccatcccgagccgttccagacctcgatctcgtagcgcagcgggaagtcggccgcgatctgctgcagggtgatgccgacgccggtgatcgaatacgtgccgtcgaggtcgaccaccagcgtggcgtcggtcttgcccgtctgcgtccagccggtgtcggtgttgccgtcggtcacgtccgggacgacggtgccggtgtcctcgtcggtcacgtcatgtcccagcgccaggttcgtgcgttcgaccgcggtgccaccgtcggtgacgtcatccatcgcggtgaccgaatactggtcgaggatgatcttgccgagcgctttctggtcgacgtcatccgcggcttcggtcgcgaaaccatacccgtcctcgtcgcttttgcggttcgcccactgccagccgtagtcgaaccagtccgggtcggtgaagtcggtgccgtgctccagtttgttcagccggttgtccacgtacgtcttccaccgccgatagtagtagtcgccggtcagcccggcccactggcggttggaatagtcgatgagcgagccgttcttgttcagaccccacgtggtgacgagcgcacgcgcgttgagctcgaacaggtcggcggtccaatcgtccgcgccgtcgagcatcgtgcgggcgtcgtcgatccatgcgcccacgaggaagtcgtccgagctggaaagcagcttgtcctgcgccttgatgatgtccagcatccgggacgacagtgtccggaacgtctccagatcgcccgacttgtacgcctgcccggcgagcggctggtattcctggaagctgttggccagcacctgccgcatcacgtcgacgtaatcgtagcggaagccggccgagtccttgtacgagtcatacgcctgctcgaacagggccgcggccttctcgaactgccgcttgtcgtaatctatgtcgctgtggccccacgtggacgccgagccgatggtgttgtcggacgggcgggcgttgatgatggattcgctcgcaccctgatagtattcgccgtccgtgtgcttgtaggcggtgtcaagcaggatgtcccacgccttctcgatcgtcccgtcggttccgccgtaccggcgctcggcatactcctgcgtccaggagcgatagtcgaccggatcctgctcccaggtcatgtcgaacagcagctcgtagacgatcggcgaattgtcgatggcttcgggcgtgatgccgatgccgcgcatgtaaccgctggagttgtaggctttcgtgatgtcctgggagatcacctccggcactccgtcaaggcccatgcgtccgccgaagttgtgcaacatgttccacacccacggcacgccctggttctccatcgggctggcctgcgagcgcaggtcgctctgcaggtcgagcacgagcgcctggcccttgtccgcgagcccggagagcttcgtctcgtcgatgccccactgccactgctgcatcacccacacggccgccgggtcatggccgagcatcttgcgctgcacggtgcggtagatgtcgacgatgtcgaagccgtctggaatcgtgccgccctcatggaacggatcgaccgcgtagtagttcgacaccttgccgaacacattctcctgagctttgtagaacgtgtcgccgaccttctggaagtagtcctccttgccggccgccttgtcggcgtcggtcagatacgtcttgatcatgtacgggcggtcgaaaccggaccatgtgccggacgacgcggccaccgacgtcgggttcttctcctggaagtcggccggcacctgaccgccgaagccctggatgaccggcgtgatgccgtacgcctgcatgcggtcgtggatcctgcggccgagctcgacgcgctgctcgaaccatgcggcgggcagggggcctccgaccgagtacaggttctgcatgtagaaccatgcgtagtatcccggcccggacaggtattcgcgcacctcgtcgtcgctgtagccgtattgggtgagcgtctcgcgcagcacctcctcctgtccgacgatgtcgagcatgaggttcacgccgttcatcgccgcccagtcgaggaacggctcgtaatcatcccagttccagaacgccatcgtgtacgagtaggtgcagaagttgagcgcgtaccggtactcgtagttcgtgtatttgaggattttccggccgactgcaggcaggctctccggcatggacagctgggagccgaacagcgggttgtagtcgaccttgcaccagtggcgcagataataattgaggccggacgcgagcgagacgccgttgttgccgcggatggagatccggccgtcgccggcgtctgagatttcgaacacgtccttgccgtcggccttgccgcgcagctggaagtcgaacttgtcgacccaccgctcgccgatcacgcggccgacgaggtttctgacctcggtgacggtcttctcggcggcatagtcggcgtcggtctctacgcgggcccactcccggccccacgagcttgagtcgaagtcggtgacggagatggccttggggctggcctgctcgtcggagaccttggtgccgtggaaagcgacttcggcgaggttgacctgctgggcggcggagttgtagctgacgctgatgcgcgcgtatgcggcttcggtggcatcgatgggatgcgtgtcggcggcaccggtcgcgggggcgtcatcgctcttgtaggccaccttgccgtagtcggcgccgtccttggacagatagacctcgtagtggtagtacgatccggcgaggttggtgatgtcgatctgcgagatgctgtatgcgccgtgcaggtcgaagtcgaggaagcggcggtagtcctgcatcgacgagtctgcgggtgactgccagtaggtcgccggatcgccgtcgactgcggcggccgcagcatggccgtccgcggcggcaccgctcgccgtgacgccggcgatcgccggttccacggcgcgcgcgaggcgtccggatgtgatcaggccgcacatgagtgtcgccatggcgataagcagggccgtcgcgcgacgccgccatgatcggtggcaggtcggaggatgttcgggcgagtgcccacgacgatgacgtgcggatgaaaccatcattggttgcccttgccttctcttgattttcagtaagaaccgcaccggcggacattgccggattttgttaacaaattatacaaagaatgggacatggcgcgcccgcgtcacgccgcgccgcgccgctttcaaccgcccctgtaccacacaatgcgatttttggcggtttttgtgctggtgtggtacagcgccgattcaggacaattcgggcgaattcctcagatcattggaaaatggcggttcctgaatttctgttcgttgccataccagctcaaaaacgcgtcgaaatcgcattgtgtggcaaacgctgtgccacacaatgcgattttgaccacaaattgacgtggtgtggcacaatccccagatgccggaccgcggatatgccggcaatagacaaaaagggttccagacgatgcacccggaaccccgatatgcggacagggcgagattcgaactcgcggtggcttgcaccacaacggttttcaagaccgtctctttaggccgctcagacacctgtccttatgtgcgccatgaagcgcacaagattcaattatacatccggcgcggatgttctccgccaccggatgcggtcgacgccgaagcgatcaggcttcccacttggtcggctcgatgacttccttgccgcccatgtaggggcgcatggcctgcggaatctcgatggagccatccttctgctgatggttctccaggatcgcgacgagccagcgcgtggtggccagcgtgccgttgagcgtggagaccgcgcgggtggaaccgtcctcgttgcgctcgcggatgttcaggcggcgggcctggtactcggtgcagttcgaggtggaggtgagctcgcggtagcggccctgggtcgggatccacgcctcggtgtcgaacttgcgggctgcggaggagccgagatcgccggcggcggtgtcgatgacgcggtacggcacctcgaccttggcgagcatctcctcctccatgctcagcaggtgctggtgctccttgtaggagtcctcctgcttggtgtagacgaacatctccaccttgtcgaactggtgcacgcggatgatgccggacgtatccttgcctgcggcgccggcctcgcggcggtagcaggagctccagccgcagtagcgcagcgggccgttggacaggtcgaggatctcgttctcgtgcatgccggcgagcgccacctcggaggtgccgaccaggtactgctcgtcaggctcgcgcagacggtagatctcgtcggcgtgggagttgaggaagccagtgccggccatgacctcgggacgcaccagcgtcggggtgatggcgagcacgaagccgtgcttctcggcctgatcgacggccatggtcagcatggcgatctgcatgcgggcgaccgcgccgcgcaggaagtagaagcgggagccgccgaccttgacgccgcggcgcatgtcgatgccggccacgccggtgccgagggtcaggtggtctttcggctcgaagccttcggccgcgaagtcgcggggccggccgaccttcttgacgacaacgtaatcgtcctcgccgccttccggggcctcgggttcgacgacgttcgacagcttccacatggcggtggtgtattcctcggcggcggcgtccgcggcggccttgtattcggcgaccttggcggacagctccttggtctgcgcgatcagcgcggccttctcgtcggcgggcgcggcggcaaccttcttgccgatctccttctgctgggcgcgggcctcctcgaactccttgagcgcggagcgacgggtctcgtcggagcgcagcacctcgtcgaccagttcgacggattcgccgcgcttgcgctgggactccttgacaatgtcagcatgttcgcgaatgaattgaatatcaagcatgtgcctaacactaccgccgtaagccgacacggacaatacccctcgaccggcccttgaacggcccgccgcacacatcacggccgctccctcccctcggccggcgcggccgttgcatcgccgcacccgactacggagccggagaacagagttccgagcggattcacacgacgttcattgcggctccatgtgccgtctcttcgggcttcctacgctggcgttgcacatcggttcccgtgcgacgaccgttcgcgccctgcgacgcgtcgcgcgggaatcttcagcaagaaggagtatccatgcgtatttcaacacgcattcaaagcctgctggtctcggcagcgctgctggtgccgctggtggcgacgccagtcaccgcagcctacgcgcagccgaccgaggaaaagaccgcggcgtcctggtcgggcgtcgtcatcaacgaggcgtatctgtccggcggcagcaagggcgccgcatacaagaacaaattcatcgaactgtacaacaccaccgacaatgacgtgacgctcgacggcacctcgctgcagtaccgtccggcgagcggcacgggcgcgagcaacgccgccgccgacctgaccggcgtcatcaaggccaagggccactatctgatcaaggcgggctcgaacggctccgacggtgccgagctgccgcaagcggacgccaccgccaccagcctcaacgccagcggcaccaaaggcacgctgttcctcgccgccacgacaagcaagctcagcccggccgtcggcgacaccacggcgaacgccgacatcatcgacgcgctcggctacggcgacaccaacacgttcgagaaggcggctgccaccgcgccgaagagcaacgccgatgtgaagtcgctgaaccgcacgaacggcgtggacacaaacgacaacagcgccgacttcacgctgagcgccgacatcacccccgaaggcaccggcgaagaatcccagccgacaccgaaaccagacccgacgcccggcgactgcccgaccggcgaggccgaaatcgcgcagatccagggcaccaccgacaccagcccgtgcgtcggcaagaccgtgaccaccacaggcgtggtgaccgcggcctacccggacggcggattcaacggctacaccatccagacgccggcaaccggaggcgcggtcaacctcgccgagcacaaggcgtccgacggcctgttcgtatacgattcgaagaacgtcaaggatcttcagatcggcgactatgtcaaggtcaacggcacgatcagcgaatactacggcctgaccgagctcaacgcgagctccgtcacgaagctctccgacaaggtcgaggccccgaaggcctccaccgtggcgttcccgaagaccgacaccgagcgcgaaagcctggaaagcatgctgatcgcgccgcagggcgactacaccgtttcggacgtgtacaacacgaacaagtacggcgagatcggactcgcggcatcgaacaagccgttcctcaaccccaccgtcaagggcctcaagggcgacgccgaaaccggtgccgcataccaggccgaactcggccgcatcgaagccgagggcgtgtacctggacgacggctccagccgcaacttcctcgacacaaagtacccggacaacgccgacacgccgctgccgtacctgtcgaacgaccagccggtgcgcgtgggcgagaaggtcacgttcaccaagcccgtcgtgctcgactaccgcaacagcgcgtggcgcttccagccgaccgaacgcctgaccggagacaacgccgatgcgcagccggtgacgttcaccagcacccgcaccgacacgcccgatctggccgcggtcggaggcgatatcaggctcgccacgttcaacgtgctcaactacttctccaccaccgccgacgagaccggctgctccacgagcaacgcctacaccgaccgtgacggcaacccggtcaccgcgaagaactgcgacgtgcgcggcgcatgggacaaggccaacatggaacgccagcgggcgaagatcgtcaaggccatcaacaacctcggcgccgacgtggtctcgctggaggagatcgagaactctgccaaggccgccagctccgtgccggcatcattcaagggcgagcgccgcgactacgcgctctccacgctggtcgacgcgctcaacgagcaggccggcgaaggcacctgggcctacgtgcccagctcgcagaccgtccccgacctcgacgtggaggacgtgatccgcaccgcgttcatctacaagcccgccaaggtcgcgaccgtcggcgaaacccgaatcctcaccgactccgacgcgttcaacggcaagaacggctacgagcacggccgccagcccgacgcccaggcgttcaaggccaagggcgccgccgactccgacgcgttcctcgtcgtcgccaaccacttcaagtccaagggctcggcgagcaacgcgctcaaccaggatcccggcgacggctccggcaacgccgactacacccgtcaggcgcaagccgacgcgctgctcgcgttcaccgatgaggtgaagaacgatctcaagctggagaaggtcttcctcgtcggcgacttcaacgcctactacgccgaaaaaccgatccagaagatcgtggcggccggatacaccgacctgagcgagcaggtgagcgaaaagaccggcaagtacacctacgcctacaccgtcaaggacgaatccggcaacacgaacggaggggtcggctcgctcgaccacatcttcgccaacgaggctgcgatgcggtccgtgaccggcgcggacatctggaacatcaactccgtcgaatccgtggcgctggaatactcgcgctacaactacaatgcgaagaacctgtaccaggccgatcagttccgtgcctccgaccatgatccggtgatcatcggaatctcggcctccggcacgaccggcggcacagccacgctgaatctgctgaacttcaacgatttccatggccgcatcggcaagaacctgacggtgccgttcgccgctaccatcgagcagctgcgcgccgagcacccggattcgtcgctgctgctggcggccggcgacagcatcggcgcctcgctgttcaattcgtcggcgcagaaggaccagccgaccatcgacgtgctcaacgcgctggggctcaaggcctccgcggtcggcaaccacgagttcgaccaggggtacgacgacctgaccggccgcgtgatcggcaccgacggcaagcgcaacgcgcagtgggattatctcggcgcgaacgtgtacaagaagggcaccggtacgccggcgcttcaggaatacagcatccagaacgtcaatggcgtgcgggtcggtgtgatcggcgtggtcacgcaggagacctccacgctcgtctcccccggcggcatcaaaggcatcgagttcggcaacccggtcgaggccgtgaaccgcgtggcccgtcagctcaccgacggcgacgagtcgaacggcgaggccgacgtgatcgtggccgaataccacgagggcgccgcctccaacgaggatgacgccaccgccaagccgaccatcgacgagcagaaggccgccagcccggtgttcaagaagatcgtcgacgacaccgacccggcggtcgacgtgatcttcaccgcgcacacgcacatgaagtactcgtacaccgatccggcccacaacggacgcccggtcatccagaccggcagctacgccgcgaacatcggccaggtcgtgctcgactacgacaaggccaccggcaccgtcacctaccgcaagtccggcaacgtggcggtcgacaccagcaagagcgacgacgagctcgcggccgccggcgacgacaccgtcaggaacgtgaagagcatcgtcgacgccgccgtggccaagggccaggaggaaggcgacaagccagtcggctccatcgccgccgacatcaccaccgccttcaaggacggcgcgcgcgacgaccgtgcctccgaatccacgatgggtaacctcgtcgccgactcgctgctcgactcactgtcgtccgagaaccgcggcggcgccgaaatcggcgtggtgaaccccggcggcctgcgcgccgaattctgcaagaccggcgacaacgagaagtgcacgatcgccgccgacggcaccatcacctatgcccaggccaacgccgtgctgccgttcctcaacaacctgtggaccaccacactcaccggagcccagttcaaggaagccctcgaacagcagtggcagaccgacgccgacggcaacgtgccctcccgcccgtacctgcagctcggcctgtcgcacaacgtctcctacacctatgatccgaacgcggcgcagggcaatcacatcacttcggtgaccgtgaacggcaagccgctcgacctcaagcgcgagtaccgcatcggctccttctcgttcctgctgcagggcggcgacaacttccgcgccttcgccgccggcaaggacacgaaggacaccggtctggtcgaccgtgacgcatggatcgactacatctccaagaactcgccgctcaagccgcgctacgaccgtcgcgcggtggccgtcaccggcatcccggccgatggcaaggtcacggccggcacctcgttcgatctgcagttctcgaagctcacgctcacctcgctgggcgtgcccgccgagaccaagctggtcgccacgatcgacggcaccgaggtcggctccgcggccgtcaaggacggcgacaccgccacattgcaggtcgcggttcccgccgggctgccggctggcgcggcgacgctcaccgtcaaggccgtgaccaacggcacaaccgtgacgctgccgctgaccgtcgcctccggcacctcgaccgaaccgcagcccggcaagcccggccagaccgagcagcctggtcagacgaagcccggtacgggcgatgaacggcacgacggcgcgaacaacgcagccggcaatggcggcaacgccggcgccgtcgagcagctgtcgcagaccggcgaacccgtggtggcggtggtcgtcgccatgatggcgttgctggccgccggtctcaccgcggtccgcacgtcgaagcgagccgatcgcatacgctgaccggccagctgaactggccacagtcctccgcgtggtgggacacgccccaacgggtgcctcctgccacgcggattttttatgcgcgcagcaagaccgggggtggtcgccaacacaccaagccgccgtcagactcgctacgcgagccagctcccaccagcgggagcaagacgacgcacctcccaatgacaacacaagaccaaggccggtcgccgtggcatccgcttcgtccctctccccacgcatgcccccgcccgtgaatatcgtgtgggaatcgtcgaatttcggcagggcgaaaccattacaagccacttgaacgttcacaatgggaggtatgccgctagccgccatcatcaccatagccgtcatcgccggcgtcatcgtcctcatcgtcgccgtgacgttcgccctgcgcgcccgccgccacaagcgcctgtcgcagcagctcgtcaaacgcaacgacgatcaggtgcattacgtcttcgtcgtgaacccgtccaagccgcaggccgcccagcggcgcgcgcacatcgaacagttctgccgtgacaagggactgaccgacgtggaattcatcgacacgcagctcgacaaggacggccgcgcatgcgccaaggaggcgctcgccaacggcgccgacgtggtggtcgcggtcggcggcgacggcactgtccgcacggtcgcgagcgccatgtccggcaccggccatgccatgggcatcatcccgatcggcaccggcaacctgttcgcccgcaacatgggtattccgatcgacgacatcgacgcggcgctcaccgtcgccacatcgcacgggtcgcggcacgtggacgtcggccgtctctcgctgctggacgatccgaaggccgatcacggccacgcattcctgatcatcgccggggtcggtttcgatgccgccatgatcgacgacaccgacccgcagctgaagaagaacatcagctggctggcgtatttcgtcggcggcgtgaagaacctgttcaccccgaaataccggggcgacgtgaccatcaccagcacggacggcagcatgcacacccgtcatggcgtggcattccgcacgttcatggccggcaactgcgggcagatccccgtgttctcgctgatgcccaacgcctcatacgacgatggcatcctcgatttcgagatcatcgacacgtcgggcggcattttcggctgggcgaacctgttcggcgatgtggtgcaccagaccatcaccggcaagcccggatcgaacccactgtcgacgaattcgacgatggaccagattcagggagtgagcgcggagatcacgctggagaagccggtgctggcccaggtcgacggcgacatgctcggccgcacgcggcatctgcgattcaccgtcgaccgcgaggcgctgtgcgtgcgcgtgccggaggtcgcgcccgacatgtcagcgacgggaatcatcccgccgattcgcgattgatacgaaaccgacgctctcagaacttgcagatagaggccattcttcatgaaaaatggcctctatctgcaagttctgagagcgctactcatgcttacgtgcatccgcgacgacccgtgcgacgtgcaacgccaggtatgcgacctcatcttcggtgaggttggagcccagacgcagcgaggcgacggtgccgatggtctgcgcgcactgcatggccttgggatatgactgccggatcgatgcgatgatcggctcgggttccttgtcgagctgcttgccctgatggatgcgtacgaacaggtagcgcaaatgggtaatgaaccggccgacgttgacgctgtgctgatcaagcgagacgccgtaggtctgctcgatgatggtcagcatctgctggatgacgccggtcatcttgtatgtgtcggacaggtcgccgttcgcgaagccggcgttgaccagatgcaacgccaatgccacggtctcgctgccgggcaggacaccgttcaggtgacggttgagttcattgaccagccgcgaggcctgcgcgtactcggacgcgtacagcgactggacttccgcctgcagcggatatgcgatgttgacgtggcgctgcgccctctgcaccgcaccggtgatgtggtcggcgagcgccatgacaagcgtgggctgcgattcggcctgttccgcgagcccggtcgccgtcatggcgtccgtcaccagtcgaatgatctccggaggtatctcggacagcagttccgcgatatggtccgggtctcggccgtcggccggaacgaacacgcgcacgattttcgcgtcgtcgacgcgctggccgggtttggcctggaatcccaggccgcgcccggtgacgatgacctcgcgggcaccgtccttggcgagtacgacgttgttgttgaacacgcgaagaattttcacggcattccttccggccgctcggccgttgcgccgattggctcttgatgcggtcagcgctggatgtccagcacttcctggcccgcctgcacgtccacgcccgtcttcggggtgacgccggcaagcgccgcggtgttcagcaccgtcatcagtgtcgtggtgctgtatcccgcctccttgaccttatcaaagtcgacggtcaccagcgtgtcgcccgcgttcacgcgctggttggcgctgacggcaacgtggaagccctcgccgttcatcttcaccgtgtcgatgccgacgtgcaccagcacttcgatgccgtcgtcggtcttcaggccgaaggcgtgaccggtctcggccacggtctgcagcacgccggagaccggcgcgaccacggtggaatcagtgggctggatgcccacaccctcgccgagcgcgcgggaggcgaacaccgggtcgccggcgtcgtcgagcgacacgacatggcctgcgacgggggcgccgaccgtggtggtgcgaacggcggtggcagtagcggtcgcggtggcggtcgccaccggtgcagcgtccgccggcgccgtctcgacggcggtcccgtcagactcgctggcggcgttcatctcggccttctgctcgggagtacggtaatcgagcatgatgatcagcaccatcgagacgatgaacgacacggcgatggagacggcgtacacccacatctggctgaacaccgggatggtgagcagggaggtgaacgcgaacgcgttggtggtcacgccgcgcaccgattcgccggctgcagtgacggacgggaacagccagccgagcaccgcgatgacgacgccaccggcgaagcagccgaccagcatgcgcttgtagatcagcttgtagcgcaggtggatgccgtacaggctcggctcggacacgccaccgagcaggccggcggcgagggcgccgagcgaggtctgacgcatgtccttgttcttgtcgcggatggagatgaacagcacgccggcggtcgcgccgaagcaggcgaagttccacacgcccatcgggccctggatgaagtcgtagccaagggactggatgttcataagcatcagggcgttgagcggccagtgcaggccgagcggcacgaggaacgggtagagcatcgggatcaggatcgcgaagatgaacggggcgtggccgttgagccaggccaagccgacgccgagccagttgccggcgaggatgccgagcgggccaatgaggaaggcggtgagggcgccgacgatgatcatcgagaagaacggcacgaacacgatctgcacgctgtcggggacaatcttcttgagcccgtggtagacgagcgcgagcacggcagccatcagcagcggcacgaacacgttgccgctgtagtcgttgagcagcatcggaatgccgaacaccttggtcgagcaagaggtggtgcccagcgtggcgctcttgacgcaggtggttacgtccttccacttttcggagtccatcaggtcggcgaactgcggggtcatcagagcggccatgatggagccaccgagccacgggtcgaccctgagcttcttcgaggcgttgtaggcaatcatgatcggcaggaagtagaacacgcccttccagatggccttgatgaacaccaggctggtgttggcttcctcgctcggcacgataccgatggagatgcacaggttgaccagggcgatgatgatcgacgcgccgagcagcacgcccaggatcgggcggaacgagtcggacaggtactcgaagaacgagtccatccacgcgactttgccgcgcaccttggcgcgttcggcggctttgacgtcggcatcggactgcgccttgtcgccggcgaccgcgcccttgccagcgccgacgcccgccatctcgggcaggtgcatgatgttctcgtacatcgtggcgaccgcgccgccgatgacgacctggtaacggtcgccggactgcggcaccgcccccagcactcccttcatggtctccagccggtgctggtctactttgcccgcgtcgacgagttcgaagcgcaggcgagtcgcgcagtgcgtcaggctcttgacgttgcccgcgccaccgatcgcttcgatgatctgcgatgcagttgatgctgccatctcacatccctttccgtgaatcttccattgatccgtctccggtgccgggccgcaaaacaaaaaaagacctgagatatggatagtcctatccgtatctcaggtcttgcgtcttgtcgacttgcaaccctgcattgagtcgattgatatgttaacttcagatgaactgcgacacgccgataaatcacaaagatggcatcgcaaccattcgggcgatgagcgggtggccgatgcgccccgcctttcatcccccatcccgcgaaagtcccatctgcgacgtgccggatgggactatggcggggtagatgggcaagaccgcgcggcacggcgtcagtcagggacgctcccgcgcgtcaccgtgggcgccgtcgggcaggcaggactttccccggattcgccctccgtcaggggtttcggttttcccgcccgtcatcgtgcggcgacttcggcgccttcgtgccgctcttgtccgaaccgtgcattgttcgagtcatgcacatcgccccgtttcgctcgttccgccgaccatatccggtcgcattcctgtattcctccgttatataaacatctatataagcatcatcgccggctcacgcgacgcatatttcgcgggcacccgtcactgtgcgcgggtcacgtcacgctgtgcgaccccgcaccgagtgacgctatgacgaaaacccttgcaatcactgggctttggggatatcgtcactgtgcgaggggtcgcgcagcgtgacgcaccccgcgcacagtgacgcaaaacccgcgcagcgtgacgaccggtcggaacatagagcaccgaccggccgtatggtgtgggaccattttcggatctcgccgtgcgagacatcacccgcaattgacggggcgggcggcgcgctcgcggctcagcccgcacgcacgccgccttacggacgcatcacggcgcccatccgcgaagacccgctaccgctacagcgtgaacttccgggaagcggcagctccggtcgtggtgaaaccggagcccttggactgcagcgatgccacggccgtcaccttgtgcgggccgggcgcaagcgccttcggcagacgaaccgtccaggcaccggcgttcccgacgatcgcgacgtagctcttgccatccaccgtcaccgtgaccttcgcgccggcggcggcatcgaccataccggatatctggccggcggcgagcttggcgaacttcggctgtccgacgttgatggacaggttgaagccgtgcttgaacatcgcctcggcgttgtacttaccgtcaacgatggcgaagccaccggcgaccgcatcgtcatcggccgcgtcatcgcaggagctcatgttgccgtacgaatccacgccgatcgagtagtggccggacacgatggcaccgcccgagtcgccgctcagcaggaaggcgctgaagtggaagccgtacacgtcgagcagctcgccgttgtcgttcacgctttcggtgaccttgtcggcggtgacgacgccgcatgtccaaccgctggtcgaaccggacttgcaggcgggcatgccgatggtgacgcagacgcgtcccagacctgcaacgggatgccgtcatcctgcgtgaaattacccacacccttggtggtcaggtctgggccggtggcgtctgcgccccacgtggacagctcggccgggttcttgtacttgctcgtggacaggtggtcgagtataccggcatcgttgttgtcgccgacgtggccgtatgcggtcgcgccgacggtgtcgcgcaaatcggagacgttctccttgcggctgcgtacgtggtggatgccgggcactaccacgaacgcagccgatggcactgtcactttcgaccagatgccgttcgacgctgccggcacgtacgagtacacgctcgtgcaggtcgccggcaacgccgatggcgtcacgtatgacagcaccgagtacgcggtgaccatcaccgtgaccgcgacggccgacaacacgctgaccgccgccgtctcgtatgcgaaggatggcgagaccgttgacgcggccacgttcgccaacatgtacaaggcgccgacgaagcctggcgagccgacgcagccggctgagcccgttaggtaagcccggtatcaagccgaccaagcccagcaagccgaaggtcacgatcttcaagccgcaggttcaggtcgcgccttccgccgatgcgatgaagacgctcgcgaagaccagttccacgaccggcgccatcgtgattgccgccctcttcgcggcaaacgccaatccatcaacctctcgcgcctttgattccccgtgccgttggcatatcggcgtcgatggccaacacagaccgcctctgccgtgccatttccactcgtcccttcctcccgcgtctccatcccctatgttccgcccttcgccatcctgccctccagggctatccgtcgtactctgtcactccactaatcaatcctctagggtcaatcgtgcttcctcgcatccttgtcgccgtgtcccctttccgccgcgtccctttcctccgtgtctcttttcgctgcattcttttccgccttccccctccccgccgtcatcctcttatctggtacaccggtacattacgggttcaaatagccgttattcacaattgcatgtgcgaaatggtcgtttttgggctttgaaacgaccatttcgcacggggaataccagataacggctatttgaacccgtaatgtaccggtgtacctaatgacagagcggatagagctgggcgcacatggcacgcacaggcagcacgcccggcaacatcaccaacattctcgaacaaaaaatcacaatttctcacaaaaacgtaacccaaatgacaccggtcgtggcaaaatagaagcatggtagcaaacaatgcgggcaagcccgccaccccagctgatctgatcaatgtcgacgaagtcatcggcaagtactatgacctcgtccccgacccggcggttccggagcagcgtgtcatcttcggcacgtccggccaccgtggctcgtccctgaagacctcgttcaacgaggcccacatcgtcgccatcacacaggccatcgccgagtaccgcaagaaggccggcgtcaccggcccgctgtacctcggacgcgacacccacgccctgtccggtccggccgagaagaccgccatcgaggtgctcgtcgccaacggcgtgcacgtgcgcgtcgactcccgcggcgatttcgtccccacgccagtcgtctcccaggcgatcctgacgcacaaccgcgcggccgacggcacccagcgcttcgaaggcgagggcctggccgacggcatcgtggtcaccccgagccacaacccgcccaccgatggcggcttcaagtacgatccggtcaccggcggcccggcaccggccgagaccaccaacgccatcgccgcccgcgccaacgaactgctcggcgacttcaagtccatcaagcgagtgccctacgaggaagccatcaagtccgagtacgtcgagggcttcgacttccgcgagcactacgtcgccgacctgggcaacgtcatcgacttcgacgtgatccgcgactccggcgtgcgcctgggcatcgatccgcttggcggcgcctccgtgaactattggccgctcatcaacgagaagtacggcctgaacatcggcgtggtgcgccccgaggtcgacccgacctggcgcttcatgaccatcgaccacgacggcaagatccgcatggatccgagctccccgtacgcgatgaagggcctcgtggaccagctcaacgccggtgcctgggacaagtacgacctggtgggcggcaccgacccggacgccgaccgccacggcatcgtctgcccgaactggggcgtgatgaacccgaaccattacatcgccgtgtgcgtcgagtacctgttcggcggcaaccgtccgggctggccggaaggcaccggcatcggcaagaccctggtctcctcctccctgatcgaccgcgtggcctcgtccatcaacgcgaagctcgtcgaggttccggtcggcttcaagtggttcgtggacccgctgttcagcggcgaggtcgcgttcggtggcgaggagagctccggcatgagcttcctgcgccgcgacggccgcgtgtggaccaccgacaaggatggtctgatccccgacctgctggccgccgagatcaccgccaagaccggcaagaaccccgcgcagctgcatcaggatcaggtggctcgcttcggcgagagctggtacaagcgcgtcgacaccccgaccacgctggagcagaaggccaagttcgccaagctcactggcgatgacgtggccgccacgcagctggccggcgaggacatcaccgccaagctgaccgaggcgccgggaaaccacgccaagatcggcggtctgaaggtcaccaccaaggacaactggttcgccgcgcgtccttccggcaccgagaacatctacaaggtgtacgccgaatccttcgtctcccccgaggcgctcgacaaggtgctcgacgaggccaagctcgtcgtcgacaaggcattgagcgaatgagatccacgcaacgcatggccgggctggcggcccgttagccaccaaacgaccgaccccgaggccctttgcggatcagcttccgcgaagggccttcgcattacacccatgggtcgtctggatgaacgccgtgaccggacccacctcggatgtggataaccatgtggataagtccgattcacgcttcgctccgcccaccgcatctgatatgatgacggtatcgtagccgcataggacaggactacggctccgacttcggcgcgcgtgcgtacagtggtgcgcccgctcgcgtcgaccggtcccatcgtcgccaaggaaggggacgaaagacggatacacctcggtttgggcgcaccaccattcacataagtaaggacatcaccatgaccagcaccagcagcaccgacgttccatccgcgatttccgcggacgccctcatcatcggattcggcaagggaggcaagacattggccgcaaagctcgcttcaacgggccgaacggtcgtcgtggccgaagcgaacgccgacatgtacggaggcacctgcatcaatatcggatgcctgccgtccaaatcactgatcctctccgccgatcgggcgcggcgagagggcgcgaaccgtaccgccgaaacccgcgaagcggcattcgaagccgccatcagggagaagcggcgcatcaccgcgatgttgcgcgaccggaactaccataagctggccgaccaggacaacatcaccgtgatcaccggccgcgcgcgcttcaccggcgcccacagtgcggaaatcaccaccgccgacggaccggtcgccgtggccgcggacatgatgttcatcaacaccggtgccacgccgcacattccggacattcccggcattcgcaccacgccgggcgtatacaccagcaccggtctgatggacgtcgacgagcttccgcaacggctggtgatcatcggcgccggattcatcggacttgagttcgcttcgatgttcgccgattttggcacggtggtcaccgtgctgcagcacagcgacgagttcctgccacgcgaggacgaggatgtggcggccgcgatccgtgcacagctggaatcgcagggggtcaggttcttgttcggcgcggacaccaaggcgatcacatcggcggatgacggcatcaggctgtccgtctcgatgaggggcgcgtcggacgtcggctccaaagcgcgtctgtgcctgtccaccgacgcggtgttggtggccaccggacgcacgccgaacgtcgagggcctgaatctcgaggcggcgggcgtggaactcaccgaacgcggcgccgtgaaggtcgacgacctgctgcgtaccaccgccgacggcatctgggctttgggcgacgtgaacggcggcccgcagcacacgtacatctcgctggacgactaccgcgtagtatggtctcagctgaacggttccgcgcgcccgtacacgctgagcgaccgtcgcaacgtgccgtcaagcacgttcctgcacacgccgtattcgcgtgtgggcctgaatgagcgcgaggcgaaggcggcgggactggattacgtggtcaagcgactgccggtggccacggtgcccaaggcccaggtgatgcgtcgaccggagggcatgatgaaggcgctcgtcgagaacggcaccggccgcattctcggtgcgatgctgctcgccgccgaatcgcacgaggtgatcaacatcgtcaagctggcgatggatctcgacgcgccggccagtacgctgcgcgacatgatgttcacgcatccgaccatggccgaagcgctgaacgacctgttcgcgtaacggtcgcggatcgcgcttgtccgcgatacatttgcacagcgtccaacaaatcggggctcccctccttggattggaggggagccccttgggttatcggctagtcagcctgccgtcacgcctcgcggcggcgacgggcgtaggccatggcgcccaggccagcacacgtggcgagcgcgatgatgatcgcgaacacctgcacgtcggcgccggtcttggagatgtcgtcacccttatgagtgccgctctgggttccgtcgcccttgttgccaccgggtgcctgcgacttgagagtcaggcccttgatggcggcttcaagcgcgtcggccatcgcgtcgaccttgctctgctggtcgatggtcagtccgcgcttcacggccttcttggccgcctcgaacttcgccaccgagtcagcggtgtagccgctcaggtccgaggggaccttggcgagcaggtcatcgatcttgccgtagtccgcggacttgtaggcaagcttggcctcggcggcttcgaacgcctccttggcttcggtgaactcggcaatcccgacttcgccttcaccggcggcggccagcttcttcagcgccttgtaggcgtcggagtaggccttgtagctggcgtcggtgtagtagcccttgtcgttgtccttgagcttgatgccgtccacgtagtccttgacgccggtggcgcgggcatccagcttggcgaccgcagcgtcgatggcggcgacgcgctcggcgagctccttgacggtgccggacttgtacagcgtgtcgagacccttgacgaccgggtcggaggtggtgtcgtccttcgcggcgagcagcttggagagcaccccgtagctggccgtggtgtacttggacgagtcaaccttgccggcttcggcgaccttcgccttgagttcgacggtggagaccagggcctccttcgccgccttcatggcgtcgatgttctgctggttgaggccggcatcccccttgaccttgtcgctcttcgccttggcgatggcgtcggtcagggccttgtagctgtcggtggtgtactcgctgccgttaaccttttccatgtcggcgatggtctcgtcgagcacggtggtgtcgggcggcgtcgtggtgcgcaccagcgcgttctcggcggcggtcagcgcggtcagcgcggcggccaccgaatcggtggtgccgttgaccagcttcgcctttgctgccttgagcgcgtcggagtacgccttccacgagtcggcggtgtagttcgcctccacgtagttgctctcgtgcgcgatctgggccttgagggcggcgacgttcaccagcgcggtcttggcggtggtgtagtcggcggtcttggtcttgaacgcggccggcttggttccgtcagcggcgatcagggcgtcgagcgcctccttagcggccttgaaagccgcgtaggagttcgtggtgtagtcggcctcgtcgatcgtggcgaagctgtcgacggcgatcgtcgcgagctcacgctggtaggtggagtccttcagcgcggcgagagcgtcatcgacggccttcttgaggcttgcggcgtctgctgtggacaggttggtcgtgtccttcagcgcttccttgacctcgtcgagcgcgtcggtgtacgcggtgaacgtcactgtcgtgtagaagtggccgtcgttggtgacggcttcgtccacgagcttgcgcagcgcggcgaccgcggcggcgtcggccttggtctgcgcggcgtcgatggcgctttgcacggcgctggctgcggcgtcgatcgaagccttgccgaccagcgggctgccgtacacagcctgggcggtggccttggcctcgtcatacgcggtcttggcgttcgcggtccaggcggaagtgtcgacggtcgcgtcgatcttctccttgagcgccgccttggccgtggtgatgtcggcgtcggtgtcggccgagtcgagcgtgatgaactcggagatctcggggatggcgtcaccccacgcgatcttgacgctgagcagctgcttgccgtccggcaccttgaactcgttgatcgcctgttccagcgttccgaacgtcacctcggaggtggagcgggcggctgtacgagccgtcacaccggaagtggttccggtcgccgcgtcgtacaccgtaccggtgacggtcgcgccactggcggcacccgactgcacgatgcggaacgacttgatgtcgctcgggtcatcgatcttgtaggtcagggagccattggccgcactcggcttgtacgtggtggtcaggtcgccgtcgatcatgttgctcggcgcgtggccgcgctcctcgaccttggtggcggagaacgccgcgttcgcctcggtggagacgtaggcgccctgattcaccatgaactcgttgaacgcgagtgcacgctgcgggtagtcggcggtggtcagcagacgcaggtagcgcatgccggtgccgttggcgatgtcgtccttgccgtagtagaagacgttcgggtagttggaatcggtcttcttgttcgtgtcgcttatgtcgccgaacgcggtcgtggtgtcggtgtcggacacaccgtcgccaatctcgaacgcgtcaacccaggtcttgccatcgacggacatctgcaccttggtgtcgcggatatagtcgtactgcgtgtcctgcgtgtagatgcgcagcgaggtgatgtcgatcggctgaccgagatcgaacaccgcggtgttgccctgtcgcggctggccggcgaacttgatgaccgtggtcatatcgccgtcgaacgcgttgccgctttcgcgggtgtcggttccccaatcgttgcgcttctggatgtcggatgagaccagcttgccgaacttgccgaccgtggaaaagccgaccttgagcttgtcgaccgagaaggccgctccgtcggtgccattgatcacgcgcacgtagcgggcggtcttgcccgtgaggttgcccggctcgacagtggtccagacgagtccgttgtcggagatctgcaggctggggttcgcgttgccggtgttcagctcgacgtcggtcagatcacggatcgccagcagatcgagtccggcgtactggccgccgtcaagcatcgtgtgcgatttgtcgaacagctccgccgtattggcgcccagcgtggcggtgtacccgtgctgcgtcttgttcgtgtacaccgacttgagcggatcggcggtctcgggcggggtcacggtgatctcggccacgcgccaccacacgttcttggcggcggtgttgcggatgcgtacgtagcgcccggtcacgttgccgctcaccgtggaggtgacgtcgtcgctcaggtcgccgagcttggtccaggtggccttgtcatcgctgacctcgacgacgccctggctcggacggtcgtcggggctggaggcatgaccggtaatcgtgacctcgccgatcggcttgctggagcccagatcgacgatcacggccgcgccggccgcgatcttgtcgccgttcgggtccttgaggtaggtgatcgtggacgggttgccgtcgatcatctgctccttggtgctgctgtaggtggcgttgaggttctccagctgcacgccagtcgccgtgtacggattgagagtccccttctcgaccttgttgacgtcgatgcccttgatgccgagccacaggtcatcgccgttgtcggcggtggcgatcagtcgcacgccggtgacgccggtgatgttcagaccggtgactttgatcggctcctcggagcccttcgggcgctcgaacgtcgcatccggcacgtcggtccagttctcgccgtccgtggtggtctgcagcttggagtggtagaagtggttcttgccgccgttgaacgcgaagcggatgctcttgagcgtggtggccttgctgaacttcacgccgacgtagttgcccttgtgcaggtagttcgggttctggaacaccgtgaccgtgctgtccttgccatcgaagatgtcttcgatcgaaccggaggtcggcgtggtgaacacgtcgctgatgtacgtcttggtcacgacgttcgggtcggcctcctgctgcaccttgttggacaggtaggagtccatcgccttgatgaacggcacgatgtgctgcacgccgacctcggcgtactcggtgtggttcacgtagtagaagccgtgcttcttggacgcggcgaacgcggactgcgcgtcggagtactccttgagcgtcgaggacgtgtcgccgttcagcgcggcctcgatgcccgcgatgtaggcgagcgcggccttggtggtgtcatcccagcagtcgatccacggggcgatctgctcgttggcgtcctgcccggtgtagtccttgccgatgtcgccgagcatcttcgcatcgcccttggcgcggtaggtcttggctgccttctgcagcgtgacgaacgcggccttgatgtcggtcagatcgtgggcggtgatggtgccgtcagccagcttcgccttggcggcggtcagtgcgggagccaggtccacggactcctgcagcgcggtgacgcgcgaatccatgttctggttgatggtgtgcttggacagctcacgcagcgcgttcgacgcggcggtcggcacggcggagttgtggtcgacgaacgagaacgaatcctgccatgcctggtcggcctcgctcttgctccgccagatgttccacgagtaggtggcgttgccgaagatgccgaccttgctcggctcggactgctgcatcgggttgagcacgatgccctggatcttcgacgggtcgacgcccggatgcaggaacgtgtcgtagccgcccatgatcaggtggctcttcgagttgtcggagcacggccagttgatccacatgtaggggccgcggccgacgttcgaggtgaacgtgtcggtgaagttctgcgagacctcgccccagacgcgtccgccggtcatgacgatctgcacttccttggggaagttggcgaagtagctcatgccgttgcccatgtattcctgcgtgacgaacggcagcgtggtcttgaggtccgggtaggtcttcttcatttccttgagccacgcgaccatatcggtgagcagcttggtgtaattgttaccacccacgttcgccgcgtcatcggccaggatggcgatctggcgtacgccgaccccgatggtctgcgcgaacttgtcctgcagcaccttcagatcggcctgatagttcgcctcggagttgaaccgaatcgcgttgttcatgaacgggtgcagagcgaacacgaaacgcgtcttggaggcgttgccggcatcggcgagcggcttgatcttggtgtcgagctcgtcctgcgtgtacagcgtacgccactgcgagttgtgcttcggatcgtccttgggggcgtagaagtacgagttgagcttgtagtagccgccccacttcatcaggttgatgcggtcctgagtgctccacgggttgccgtagtagccttcgatgaaaccgcggctgaccacgtcggcgtagtcggtgacggtgaagttgcggatcgtcaggctatcgatctggccgagcacctggtacagggtggtcaggccgtagaagctggcgtcggtgtctttgccgagcacggagatcgtgccgttgtcggacttgaggaagtatgagtcggtcttgtcgaagatggcggaatccgggctgtacttgctttcgatggcagtctcggccttgccatcggaaccgttcacgcccacatagacgttggtcttgccgctgactgcggcgtcggattcggtgacgttcaggttcttgagcgccgccacttcgtccagtcggtcctgggtggcttcatcgatgtcatcgtcatagatgacgttgatgtcgcgaagaatgtactgtccgctgtcataacggatcgaatgcggcttggggtacagcgtgtattcggtcgccgccgtatcgctgcctgccgcgtacgccgtctgcacgccgatggccactgccgggctcaacgacagagccgcggcaagcaggcctcctaatgccttactgcgcatactggggttcctttccttgtccggcactggggacgcgccggctgaatctctcatcattgaattattcgtcaccatgctgctttgcatcatcgtgacacggggactcgtgtgagttcatcattggtcagtattcagtatatataattaacaaaatatcgcgacgtttttggtcgtgtcgcagcccaccggcgattcatggccgcgacacggcgtgcgttactgttgttgtcatgaccatcaccgtatcgacagacggaagcgccctgggcaatccgaacggcccaatgggctgggcctgggccgaccacgaactcaacatggcacattccggcggccatgagcacggcggcgactgcgatgccggcggcgccacgaacggcacgaatcagatcggcgaattgtgcgcagtgctggaggcgctgcgcgcacatcccggcgcggagccgctggtcatcgagaccgactcacagtatgccatcaactgttccaccaagtgggtgcacgggtggaagaagaacggctggaagaactcgcagaagaagcctgtgaagaacgcggcgctcatcagggcgatcgacgccgagctgtcgcgccgcgccggctcggtgaagttcgtgtgggtcaaggggcacgcgggcaacgccggcaacgagaaggtggacgacctggcccgcacgtatgccggcgactgccgcagcggcgtgcaggagggatatctgccgaaggagggatggcagtcgctgctggcttcggagtatgccaagggaactgacgtgccggatgatgcgcagatgctgctggacggcaggatttccacgcaggagtaccatctcgggcgaggcggggaatcgggtgaagcgggagccgagcacgaatcggacggcgacaacgtcgcaaagcgaatccgcaagccatcgttggcggagctgcttgccgaacccgaaggcgtgcccggctacggcgagacccagtcggacccatcatccaccactgcgatgtcagttcctgctgttcccatgacgaccgaatcggacgcgaccgtcgcactgtcatcgaattcggcacaggccgaaggcacacagtccggcagctccacacgctctgtggccgaacctgcggcgccgcggctctccccgaccgccctcaccgcgtcgggcacgctgcgctttactcccccgccatccaccagcccgacatatgacggacggccgcgcatcatccacggactggttcgcgtggacggatatgtgaacggcgacggcaccatcaccctcgacaatgccgcgttctatacggacaggcagggatagcagccgaatggcgacggttctcctcccaaaacccggacgaacggcggtgacgttccacgaaccggatactatagaggtggacttcaatcccaaagtttgaagcatgtttccctccaaggggaatgcacggacatttcaaggagtacatgatggacaaggcacagcaggatgcactgaagaaggcggccggcatcgaagccgctaagctgatcgagaacggcatgatcgccggtctcggaaccggttcgaccgtgcgtttcctggtcgatgagctcggccgccgcgtcaaggaggagggcctgcagttcaccggcgtgacgacctcccgtcgcacgcaggagcaggccgaaggttacggcatcaagatcgtggacatcgatgatgtggatcatatcgacatcaccattgacggcgccgacgaggtggacaagaacttcaacggcatcaagggcggcggcgccgcactgctgtgggagaagatcgtggccacgaactccaacaaaatcgtgtggatcgtggacgagtccaaggtcgtcgacaccatcggcaagttcccgctgccggtcgaggtgattccgttcggcgccggccacgtcatcaagcagttcgaggccaagggctacaagccggtgctgcgcctcgacgccgacggcaaggaagtgcgcaccgacgagaacaacttcgtcgtggacctgcatcttgagcgcatcgaccacccgcaggatctcgccgaggacctgatcaacacggtcggcgtcgtcgagcacggcctgttcctcaacatggtcgacaaggtcatcgtcggcgaccccaacggcccacgcgtaatgaccaacggcaacaagtgacctaacgcggcgaatcgccgcctcaatcccggcgccggcagccccccccccatcggagtctgccggcgctgtcatatccagttcgcttccgccagcggggacgagaatgtaaaagccccgcggccgacagggtcgcggggctttgtgtgcgcgcttgcgagcgaacgactacttgcgctggtggcgagtcttacgcagcatcttgcggtgcttcttcttgctcatccgcttgcggcgcttcttgatgaccgaacccatcgtcagcctcccttagtacgttaaagattgcaacttgcccaatagtacacgtattgagggacttacgcatccgcgcgttccatttccgccatgaatccgcaaatcaccccgaattatcacgaaatcacagcgggaacggctcatagaaccgcagcacggattccttggagccggtcacctcgaacacggcggtatcgttctgccacaacgccgtcgcggtcttgccatccttactgtcggccctcaccgtgtagctgccggtgctcttgcccgacaccttgacgtccccggacttcagctccttgccggtcaggttcttcgccagctcgtcgtactgcttcttcacggtgtcggagtccgaccattgcgcgacgatgacggtcacgtccttcgccgacttgcccgtggagtacgtgagcgtgtactcctccagcggcgacgcggacttccaggtctcgctggcgcccgccttggtgcgcgcgtagttgagcacgctgtccggcatcgccttgagcagttcggatgcgtcatccggcagcgcggtggccttgatgctcggcttggtaggctcggcggcggtctgctgctgcaccttcgtcacttcgtccgtcttgttcaatgcccaaccgggccatacgaacgcggacagcagcgcaagcacgacgaccagcgcggcgacgatcatcacgacgatcagcttgccgcgcgatgcggaactaccgtgcggatagggaggggattgagtctttgccatgctgtgattctctcacgcgcatacgacgcaacggcatcgtttcgccggcgacgtcggcgtgccgctttgtgctaaggtctgcggtatggtgaagtcggcgacgcgatatgtatgcagcgaatgtggttgggatggtctcaaatgggtgggccgctgcccgcagtgcgggcagtggggcaccgtggaggaattccacgaggcccggcccgccgcatcgtcgtcgcgcaccgcggcgccgggccgcacctcacgcacgcaggcggccgcgtccatcgtcagcgcggcgacgcccatcacccagatagacacgtccacggcgtcacggctgtccacgggtttcgacgagttcgaccgtgtgctcggcggcggcatcgtgcccggctcggtcgtgctgatcgcgggcgaacccggcatcggcaagtcgacactgctgctggagaccgccggcaacatcgccgcaggccagcccaacggctcggtgctgtacgtctccggcgaggaatcgcaggcgcaggtgcggctgcgggcgtcgcgggtcaatgcgatggagcagaacctgctgctggcgtccaccaccgatctcgccaccgtgctggggctgatcgagcggacgcggccgacactggcgatcgtggattcggcgcagaccatcgtctcgcaagacgttgatggcatctccggcggctccacgcaggtgcgcgaggtggcgagcgcgctgatcgacacggcgaagacgctgaacatccccgtgctcctggtcgggcatgtcaccaaggacgggtccatcgccggcccgcgcacgttggagcatctggtggacgtggtatgccagttcgagggcgatccggaaacggcgctgcgtatgctgcgggcggtgaagaaccggttcgggccgacggatgaggtcgggtgtttcgatatgagtggcgagggcatcgaggaggtcagcgatccctcgggactgttcctgtcgtccgccgacgaacgtgtggagggcacgtgcgtgacgttcacgctggacggccatcgcagcctgcccattgagattcaggcgctggtgaccagttccgtgctgccgacaccgcgacgggcggtggtgggggtcgagacgaaccgcatcgctatgctcaccgccgtgctgtaccgacatggcaaggtgaacctgctggcgaacgacctgtatgtatcgacgatcgcgggaggactggcgaaggaaccagcctgtgatctggcgattgtggcggcgctggccagtgcggccaggtcgaagccaatcgcgcgagacacgtgcgccatcggcgagatctccctgaccgggcagattaggccggtgccgcggctggagcaccggctgcgcgaggccgcgcggctcgggttcgccacggcggtggtgccgccgatgcgcaagcgtgtcaccatcgaggggctgcgcatcgtagaggtgacgcatctgcgcgacgcgctggagtctctgggcgtcgtctgacagtgacggtgacggtggcgacacggcacgcgcaagatacgcgaggcacgatagcggcgcgattcagcgcatgcgagcctatgccgataccgttcggacgcaggtggagagaccggcgtctgtcgggcgctcctgccgcgctcaacgcgcggaggtcagttccctggtctcctggacgttgcgcgtcaattcgtccttgagcgcatcggcactgtcgaatttcacctgcgggcgcaggaatcccgcgaattcgacgcgcacgtcgtgaccatacaggtccagccattcatcggtgaccgcgtacgcctcgaccacccgctcattgagaccggtctcttcgttgaaggtcggcttcgtgccgatggagatcgctgccggccaccggtagggtgattcggcggcgagcctggccttggatgagccagaatcatacacgcgcggaatcaccgagacattgccgctgccgctgttgccgtcggaggcgttctcgtcggagtcggcggtcgctcccgccgcgcccaaatcgatcagccagccggcatacacgccgtccaccggaatataaccgtcaatcatgctccccaggttcgccgtcgggaaaccgattgtgcggccgcgctcctcgccgtgcaccaccgttccctcgatggcgtgcgcatggccgaggatctcgtcggcggccttgatacgaccatgtgcgagcaggtatcgcacgttcgtcgagctccacacgcgcacttcgcgcccctgatgcttcttgctccacacgcgcagctgcgccttggtcatgccttcggtcggatccacgggctccccaggctcgctcggcatctgcggggtgacgtcggccggcacacgcacatgacctgggccgcggtcgtcgacgatctcaagctcgaacacgccggtggcctgcgcgaggactccgatggccttcacatcgccagcgcggttggcgcccatcgccgcatccgttcccagcaccagcgtgcgcatgcccagtttgccgaccatctggccgaggaagaaccgatatgatttcgtggcgaacgccagcgtatagcgcacgatcagcacatggtccacgccaaggttctccagcgtccgcagccgctggtcgacgctggtcagcgccatggggtcgcggaagccgtcgcccggctcctgcccgtcatgggcggccgcgtacgcgtgcacgacaccgggacgcgggtcgaacatcaccaccacggaaaacgccttgtcggccttggcgagttccaccgctcggcggatgaccgcctgatggccgcggtgcatgccgtcgaacacgccgaccgtgaccacggatttcctgttggcactcagcgtcggccattcgaccagcccggaggcgtccggggcaagaatcgtgattttcatgggtgatggtgttccttcacgtgttgcgccgtatatgcggcttgtgggcatggttccggccttccatgatacccgccaccaatgcggctgcgccaccgaatgatgaactgatttgcatcatgccgtcccgatgccgtcactgtgtgcgggcgccgtcactgtgtgcgtggacgcacagcgtgatgcataccccaaaacccttggaaaataaggatttctggcattacgtcactgtgtgcgtggacgcacagcgtgacgcacctcgcacacagtgacgcattacgcgccgaatacggtggccggcttggcctcgccacgcttggcgcgctcgacgagtgccaccacttccccgctctgcggcagatacgcggtggccgtaccgtggatgtcataggggatacgccggccgtaccgcaggttgacggcgtcctgatcggtgatggcgagcagcggcatggtgcctcgcgcggcatccagcatcgtcagcgccttgcctgcgagctcgtcgccaatcacatcgagcacggcgcggttgcgggactggtggttgccgttgcggtcggtgtactcgcgtgtctccacgtgcgcggtgatgacattcggcgaggagacgtcgaaaccgcccacccgcgtgcgccgcagccgtatcaggtgcccgccgactcccagcgccgcgcccaggtcgcgcccgagcgcgcggatatatgtgcccgccgagcagctgacgcgcacatcgacgtcgatcaccggcgtcgcctccgcgtcatcccgttccgtcgttgcccgcccgtccgccgccgagacgagcggaagtcctagctgccgcgtcggggcatagccgaaccgcacatccagcacaccgaacgcgccgacggtgatccgacgcgccttgagctgcacgtccttgccgtcgcgggccagatcataggcacgttgaccgttgattttgattgcggagaacgtgttcggcacctgctcgatgctgccggtgagctgcaatgcgatgatgtcatcgatacggtcgcgccacagctgctggcaatccggcaaaaacgcttcctgatgcggatgatacgcggagccgtcatccgcgacctttgcggctgccatggccgaacccttggccgcgttcacaggcccattctcgccagccgactgaggcccaccggcgaccggcaatgccagcagctcttgccagcgctcgggcgaggtagccgacagcagttcgccatcggcatcatcggtggtggtggactggccgaggcgaatcgtcgcctcataggtcttgtcgtgttcgacgatatggttcagcaaccgcgtggcgttgccgaatccgacgaccagcacgccggtggccatcgggtcgagggtgccggcgtgccccacctttttcatatgcaatgcgccgcgcgcagccgcgacgatgtcatgactggtgacgccacgcggcttgtccacgaccaacaatcccgacgtaggagtcgccggcgcggcggagccagccacaggcgcggcttgcgcagccacgatcggagcctgctcgccgcccgaggcttcgggtacggtccccatcagtgaatcctctcccgtctcgcagaaccgctgatatgcggctcagcggtcgcccgttgcctcgtccgtcgcgttctcggcgtcatcttccagggtctcgacgccgatgccgttgccttcgacgtcgtcatcgtcgaggtcgtccgcgtactcgtcgtcatcgtcgtcatcgtcaaactcgtcgtcatcgcgctcttcaggatgcttgtacgggtcggcgtcgcccgcgtactgcgcggtctcgcgcgccttggcgatctcctcgtcacgcttgtgcgcgacagccaggatatcctcgatctcatgcgcctcgctcggcacctcgtcatagatgaactgcagctgcggggtcagtcgcaggccggctttggagccgaccagcgaacgcagccgccctttcgcctgatcgagcgcctgcttggcgcgcttgcgctccccctgctcgcgcccatcatgcccaagctgggtccagtacaccttggcgatctgcaagtcattggtgacgcgcacatcggtgatggtcacgctcgcaagccgcttgtcgtgcagctgagcttccatcgacgacgcgatcacccgttggatcagcgccgcgactcgtgcggcgcgcgggttcgttcctgccataaaaatccttttcctcgattgcgcggcgaaccgctgacaatatcactcgtatcatattcgcacatcccctactcgaaggctcacagcgaatcgttctcaataagaaacatgcggggattgcgcacattagcgcacaatcgaacaaaaccgaaaagcccggagttccggccatcagcagcgaatactgttcattggcgaaaaacgggggggcgcacgaaccgtaatgagaatggttcgctgcgcccgtccgcgaaaaagcggcggacacccgaaagcgcccgcctcccatgtatatatgcgccttacttgcgctcgacttcctgcatctcaaaggtctcgatgatgtcgccgagctcgatgtcgttgaaagtgccgaggttgataccggcctcgtagccttccttgaccgactgcacgtcgtccttgaaacgacgcagcgaggagatctccaggtcgttgaccgtggcgacgccgttgcgcaggatacggcacttcgtaccgcgcttgacctcgccgtcctgcaccatgacgccggcgatgttgccgaacttggaggagcggaagatctcgcggatctcggagtgggaggtgacgacctcctcgtattccggcttgagcatgcccttgagggcggcctcgatgtcttcgatcgccttgtagatgatcgagtagtacttgatctcgacgccttcacggtcggccagatccgccacctgacggttcgggcgcacgttgaagccgatgatgacggccttgtcgacggtcgcgaggttgacgtcgttctgggtgatcgcgccgacgccgcggtggatgacctggatgccgacctcgtcggacacctcgatcttcatcagggagtcttccagcgcctcgacggaaccggaggagtcgcccttgatgacgatgttgagcatgtccacctcggacttggcgaactgctccttgaggctttcgagcgagacgatcttgcggcgtttcgcgagctgcgcggcgcgttcggtggcttggcgcttctcggcgatctggcgggcggtgcggtcgtcggatgcgaccaggaagagatcgccggcggtcggcacggacgtcagacccagcacctgcacgggcgtggacggggtggcttccttcatatggttgccgttctcgtcgagcatggcgcgcacgcggccgtacgaggtgccggcgacgatggcgtcgccgatgcgcagggtgccctgctgcacgagcacggtcgccacagcgccgcggcccttgtcgagtcgggcttcgacggtggcgcctcgggcgtccatatccgggttcgcgcgcaggtcgaggtcggcgtcggccgtgagcagcacggcttcgagcagcttgtcgacattggtgccctgcttggcggaaatgtcgacgaacatggtgtcgccgccgtactcctccggcacgaggccgaactcggtgagctggccacggaccttctccgggttcgcgcccggcttatcgatcttgttgacggccacgacgatcggcaccttggccgcctgcgcgtggttgatggcctcgacggtctgcggcatcacgccgtcatcggcggcgaccacgagaatcgcgacatcggtgagctcggcaccgcgggcacgcatggcggtgaacgcctcgtggccaggggtgtcgaggaacgtgatcttgcgcttctcgccttccagatcgacggtcacctgataggcgccgatgcgctgggtgatgccgccggcctcgcgggcgatgacgttggtcttgcggatggtgtcgagcagtcgggtcttaccgtgatcgacatggcccatgacggtgacgaccggcggacgcggcttcagatccgcgtcttcctgcagctcctcgctgtcaaggtcgatgtcgaactgctgcagcagctccttgtcctcctcctcggcggagacgatctggatgttccagccgatctcctcgcccaggatctggaaggtggattcgtccaacgactgggtggccgtggccatctcgccgagatggaacagcacggtgaccaaggccgccgggttgacgttgatcttctccgccagatcggcgagcgaggcgccctgacgcaggcgaacggtctggccgttgccggtggggatgcgcacgccgccgatgacgggcgccttcatctcctggaattcctgacgcttcgcgagacggttcttgcgggccttggacgacttgccgccctgacggccgaatgcgccggccgcgccgccgcgaccgcgaccgccgccgcgcgacggaccggttccggacgtgttggagttgttctggaagccgccgccctgaccagcgccggtgccagcgccggcaccgaagcggttgccgcccgcgggacgggcgccgccggtctgacccggacggttatgcccccactgccccggcttggcgccctgcgctccctgaccgggacgaccgccacggaatcctccgcgaccgccctgacctgcgccgggacgaccgccacggccgccgcgattgtcgttgtggttgccgtttacggtcggacgggccatcgggtgcggacgggggatgtcgcgcggggtgggcgcgtgcatgccctgcttgcggctgaacgggttgttgccgggacgaggccccggagtcgacggacgggcgccgccgttggcggaaggtgcgctgcctgcgcccggctgctggccctggcgcggctgaccctgatgggagcctcctcgggaatcctgcggacggccgccggcgttgccgccgtgaccgggttggtgggaacgcgggccggggaaggcgccgcgctgccctgaaggcgcgtgcggattgtgacgctgcgcgggtgagggacggttctcgccgccttcacggttcggtcgagcgtcacgcatgtcgccgcgggattcgttgcgattgtcgcgcggcgtcgtgccgcgattcgatgacggcacatgtgcagcaggcgccgcagagcgcggttccgccggacgcggtgccgcggcgggcttcttgcccagaccgggcttggctacaggtgcgggcttgactgcgggagcacgatgctccgacggtgcgggagccggtgtcttgcgttccgctgcggacgctcccggcttcgcctcgcccttctggaaggcgttcttcaacttgcgcgccaccggcgcctcaaccgtcgaagaagctgattttacgaattcacccatgtccttgagtttgtcaaggacggttttgctgtcgacgccaaaatccttggcaagctcgtacacgcgttttttcgccacattactcctaattctgggccgcgcgtagactcgcgcggctattttccgatgacggattctgcccgtttcatcgtgcaaccatggtcgtgttacctcatatctcgatcccgtggcatgacggcataacgcatccacacccggtgtgccgtgtccagcatactagggacgttggatgtgccgtcggccgcgcgtcaccgccgtgtcgcggatcacttgccttcggcagcgaccttcttcgcgtgcgcttcggtggattcgatgccgatcttccatccggtcagcttcgccgcgagacgcgcgttctggccttccttgccgatggccagcgacagctggtcgtcatggatgaaggcgatggcggtcttgttcttctcgctgatgacctgcacgccggtggcgacggcgggagacagcgcagaggcgacgaacttcgccggatcggcggaccagtcgacgatgtcgatcttctccggtccgaggttctccatgacggcgcgcacacgagcgccgccggggccgatcagggcacccttggggttgacgccatcggtgttggcgcggacggcgatcttggtgcgggcgccggcctcgcgggcgatggccatgatcgacacggcgccggacaccagttccgggacctcgcgctcgaacaggcgacgcaccagctcggggtgcgaacgggagacgacgatctcggggcccttgacgccgcgcgccacgttgacgacatacacgcgcagacgctcgccatgacggtaacgctcaccgggcacctgctcgcgacggggcagaatcgcctcgacatcgccgatggcgacatgcacgttcgtcggatcgctggcatcctgctgaacgatgccggtgacgagcttgcccttctggccggagaaggcgccgaagaccttgtcgtcctcggccttacggaacagctgtccgatgacctggcgcgcggtggccgcggcgaggcgcccgaagttgcgcggggtgtcgtcgtactcctcgcccagctccggtgcgggatgagggtcatcctcggtgggctccaccgggatctccttacgagcccacacggtgaacgtgcctgcccgcgtgtcgagttcgacacgggcatgcttggccgcatgaggtgttttcagataggccagacgcagcgcctcttccagtgcggcgtccagttgttcgagatcgattccttgctcgatggcgagctgatgcattcctgccaggtccagttccatactcaagacctcctatgaagttatagccgtggtggcgcgcatatggtcacagtcgtctattagtgtagaggcctatgcagacacgtcattggccagatcacggcattccatgccgtgagaggaacatatcttcgtggtgtcgccgtatcgtcgcggcactctgcatcaccgccctgtgcggcgccctgagcgcctgcagcgcgccccggatcgatgggcgcgcggagtcggaacaccagcccagcgcctgcgagagcgcctactgggccgccgacgcgtcgacggccaccatgaacggccgtcaccatatcatcatgcgatatctcgcggcgaagcaggccgtcgggcagtggagcgaggtggccgccacctgcacccagcgattcgcgcagggcacgatcagaagcgcccaggccgagcatgtggccgtgacgctgggcacaaggatcggtggcaacgacacctaccgcacggtctccgacgacagcctgaggcaggttctgggcatcgacctcgacggcgccaccttgggcgccatgtcgctggccgaggaccgcgccgggttcgtcatggaggtgctcgccgcgcgggatacgcccggcgccaccctgagccggtccgaccggcacaagaccgcggggcaattgctcttcaccgcgtccggcttgagccgcgacccgcgagaaaaggtctacgacatccagaagatcctcgcctcgccgacctcgatgaccgattccacgaccggcctgagcgtgccgacaacggccttgacggagatcgactgcgcccgggagcagctcgccgcaatggccaatgacggggcgtcggccaagtcgaagcacaccgacaagaccggcaacaacaccaacggcagcggcgataccgacagtgcaactgacaccaccgacgtcaacgccaccgataccaacaccgtcggcacggaaaacgacgcacgcctgcgtgtcctctccacgctgatctcctcccacatcacctccgcattcgcactcggctaccccgacatggacgcgttcctcttctcctgatcgcgtcactcccgcagccctattatgcatacgggggtaaaagcaacacccgtacgccgcagaagtcagcccgattgcatatgcgcagcataaccgtttcttcgtaaaaggtctcacgttgccgtgaaacccgatgggaaaaacgccaaactcaccctcgatggctcatcgatgagccagcaacgacaacgtagggcctataggagcttttgtggtgtttatgatcgaggtctggccttgtacgagtaggcgtgtcggcatgtctttttccccgcgtggaaaaagatgcgctcccggtggtgggctggatggtgtgagaacgccatccagcaaagcgaagaaatgcccggcatgcgggcgtgcgatgaagaagaacggacggaccggcaagggcacgcaacggtggaaatgccgggcctgccggctgagctcgacgatgccgcagcgcggccgcagacgggcgcggacgctggaggagttcctctcatggctgccggggccgtcgtcccagacggcgtcggaatccacgggcgacgcgcacgccctgcgcaagcggatcgcatggtgctggtcaatccggccgcgcatcgccccgccggacgcgaagcgccacacggtcatggccgacggcacgtacatgggccacggctggcgcctgatcatcgccatcgacggcgaaagcggagaagtcctcgccttccagtggcgcgcatacgaggagctgcgccgctgctgccggcggttggagaaactgttccgcgcgggggactcttcgcctttcccgggccggcgcttgccgcaggtgggccggtggcgcgcaccacgaaccggctggagggcggcgtcaactcggtcgtcaagaacgtgttgcgcaacccgcggactgcccgaggagcacatgctccgcgcgtgcgaatgggtgtgctacatgaagaccgcgcacccgcggccggaatcattcattcccgacgatccgctggaggacgggaaagcgacgtcgcccgaaccggaaggcgacgcctcgcccgcatacgggatcggcatcgactggaacgaattccacaccggcacgcgatatcccaacggcaccgactgacgccgagaaccagacctaaagcaccacaaaagttcctataagcccgaaagagggttccgggagaatcccggaaccctctttgctggcggatagggcgagattcgaactcgcggaggggttagcctcacacgctttcgaggcgtgctccttagaccgctcggacacctatccatgcgctgcgaaaaaacgcaacttgttcattataagtcgatttcccgattacgcaaatcagcgcgtggcgcacctgccaccgctccatcgagcctccatcggcgagctatctgcgtttcgaggggtggattcagctcctgcaaaacatctatctgcatttcaaggggttggtggtcaagtatgacggctcgctaatccgcatgattccaatagcgtaacaagccgaatacatcaggtatcgcgtttgagcaaccccctgaaacgcagatagatgacccgagcagcctcaatcaacccctcgaaagcgagatagcccgcaaaacgccccaggcaaccgtcctcacagcagctgctcgtggacggaggcgttcacccattggttctgctggacctgatagcccgagaagatgccgatgtcgagcatgcagtcgcggtaatcgcgcccgtgggcgatggtgatgtagttgtcgtcgaccatgcggttgtgggtggggtcgagcccgatccaacggccgtcgtggtagatctccacccatgcgtgcgtcgcaccctcgccgcccagcaggcccgcgatgtagcgggcggtcagcccgacgtggcggcacaccgagagcatcacgtgcgcgtagtcctggcacacgcccttgcgctgggcgagcgcctgctcggcggtggtgcggatcgtggtcgaggcgggcgtatacgtgaacgcctgatacacctcgtccatcacctcccatgcctgatcaatcggagtggcatcggccggcagcccggcgatgcgcgcccggcacgccgcgatcatggcctcgatgcacggcccgggaatcgtcagcgccgagttgaaccggtacagcggcttatagatctccgacttgatgtgggcgttgtcgacgaacgcgatgcccttcaccgaatagctgaatatcgtgtgaggctgcgggatgaacccggtcatgaccacggaatcgaacgagtcgatggtcgtctccagttcgacgtccggctcgatggcgacctccacgtccaccacctgctgtcgcggaccggtcgcaggcacgcagcgcagttggaaacgatggtcggtgaccggcgagctgaacgtcagcttcatctcgtagtcaaacaccagtttcttcatgacggcaggctcctcgtcggataatgctcgcaaaaatccactctagtctagcagaaacggcggaggtcatccgtcagctgacggccgccgaccggtcactctccgatcggcggcctgcccctcacggacgcttggcgtccatgttcatcgcgttgagcatgcccgcgtccttcgggtcgccggtgatggcccggctgttgaagtcggtgaggaactcgttcaggcggctcgtcagctccgggtagccgcggctcggcaactgcccgagtagccagctgatgccggacacgaagcacgagggcaacggcatgccgtcgagtgtgcgcgagtaggtctccaacttggcgagcggcgcgtcgagctcgctattgtccagatggaagcgggtgtacaggtcgatgcgctcgatgtacttgccgatgaacacgaacgccttcagtgtgatgtctgcggtggagttctcgatgccgccccagaacgcgagcatgtcgtcggcgatgtcacgctgcgagtagatgtcatccgcgctggcggaacgctcggcggcctcggtgatgttcttcaccgcgagctcgacgtactgcagcagcctcgacgtcagctccgggcgcagcaccacggcgttgttgaacgcggcgacgatggcggagcgcaccgagtcggggttcgtgccgtcgtagaggaaggagtggatgaacccgtcgaagtcctcgaaatcctgcggtaggtcgagcgccttcgcgaacgggcggaacgcgtccacatcggtgtccatcacgcggtcgtagaaggggaagaactgcacgagtgtcgtgaacgcgcgctcggtgtaccgcccgagccagtacaggttgtcggccttcgacgcggtgaccagcgacagcgagtgccgcttcgaatgcggaatgaggttcaccgaggcgaccgactcctcgcgctgcctgtccgtgctgccgtcttcgggcgccagcacccacgtatccttgaatccgccgccctgcgacgagttgacgatcatctggccgggcactgacgagtagcgcgtcaagccggaataccacacgtgcgtgttctgcccggtgaccacgaacgcgcgcagatcgcacttgcgcgggctcacctcgccactgtccgggtcgatcacgtcgatgtcgcggaactggatgacctcctgcgcgataaaccggcgcggatcctccttgatgcggtcggccagatcctcccgcgcggccttgtcgagcgacgagccgaacacgacgccgtagcctccggcttccgccacgtccttgatgaccagctcgcccatgcggtcgagcacttccttgcggtccttctcgaacatcggcatgtaggtcggcgcgttgtgcaggatcggctcctcgttgaggtagtaacggaccatctgcggcacgaaatagtagatcgccttgtcgtccgcggccccgttgccgggcgcgttgatgatggcgacgttgccggaacggtaggccgacagcagtccgggaacgccgataaccgagtccgggttgaacgcgaacgggtcgaggtattcgtcggacaggcggcggtacacggcgcccacgcgatgccggttgccggcatagtcgaggaagtacagcttgttgtcgacgacttccaagtcttcggggaacgcgagcgccgcgccggtcttctcggccaggtaggcgtgctcgaagaacgccgaattgtagcgccccggcgtgagcacgacggcgatgccttcggtggatacgaagtccatggccttgcgcagcagccgcggatagtcgcggttgtcgcgcacgtgcacgtcgcggaacagtttgggattcgtacggcgttcgatgtcgcgcgcgaacagcgggtagctggctcccgacgggatgcgcaggttgtcttccagcacccaccagcgcccgtcctcgccttggacgaggtcttcgcctgcgatgtgcgcgaagatgccgccgggaggagtcacgccgttgacttgcggaaagtagccggccgacgtgtacacgtattcttcggggatgacgccgtcgtggatgatgcgcttgtctgagtagatgtctttgaggtaggcgttgagtgcgttcacgcgctgcttgaggccggcttccagctcatcgaattcgtcggattcgatgatgcgcgggatcgggtcgtatggaaacagccggtcgtggtattcgccgttcttgtatacgccgaaacgcacgccgttgcggctcagttcacggttgatgtctcctcgcctgttgaccagttcctcggcgaattgtcgggctgaccgttctgtcatggcgactccttgtctcacagatacgcatgctgaacgcttatgctctatgatactgaactcgtcccagcgtatgcggccgtggtttccgcattcgctcgaaaaatcgacaatcatgttacgaatcggtcgcgccgcgaacggttcgccggcatgccgaacgtctgccttcgcgcccacccccgcgtctacagcgtgcgcttggcgcgtatacgctcggcccgttcggcgagctcgtcgtcggcgggataggcgacgtgctccagcgtcagcccttgcggcgcgatcggccctgtggagccctcgcgcagcggcacggccatcttctctcggaaccagtcggtcgagcgcttgcccatgccgacctgtatgcagccgccgaccagcgagcgcaccatgttgcgagcgaaggcgtcggcgacgatggtgaagcacagcaggtcggattcggcggccggcgtgcggtatcgctcccccatgccgtcgacgaccagcggccgggtggggatccgccgccaatatgcggttttgacctcgcgaatcgtggtaccgcccggattgggggtggcgaacgagccgaaatcatgcagtccgatggtcatcgcggcggcctcgttcatcgcggcgacgtcgaggtcggcgtcgaggtgcagcacgaagccgcgcagacgcgggtcgacttcgctggcacggtcggccacgcgatacacgtaagtgcgttccagtgcggagaacctcgcgtcgaatccgctcggcgcgaccgtcacgtcatggatggtgatgtctgcgggcagcatgcgttgcagacggtgcttgagcgctacggtcggcggcacgctcatgtgcccgacgcagcggctcagcgtttcctcgccgatgtcgagatggcagacctgatgcgaggcgtgcacgcccgtgtcggtgcggccggcgacggtcaggcgcagcggctcggcgggatcgtcgaccggcacgcgcgtaatcgtgtgcagcacccgttcgatctcgccctgcacggtgcgaatcgtcggctgcttcgcccatccgaagaagccgccgccgtcatatgccaggtcaatgcgcaatctcatcacgcccaccagtatatcgacgccgcgccgagtcccctcccccacctcgcgacacccatgtgccgatacactgtgggcaaatgttggatgtaacggtaaactttgtttatattggagcaaagtcgcaacgaatgcggcgatgcgctaaccaatcaacaaagattccgacaataacagaaacaacattaaccacatacccaatggagagattatgcgattgaggagagtgaaagcggccataggcagtgtcctggcagccgtgacactactgagtatgtcgctgaccggcgtcacggcggcgcaagccagcgatgacaatcttgcactgaatcagaccgtaacgtccagttcatatgaagtggcgacgactgcgcccgagaaggccgtggacggcgatctcggcacacgctggggcaccgcgcagaacaaggccgcaaacgaatggatcgaggtcggcttgggcggcaccaagaccgtcaagcagatcaacatcgatttcgagcgcaaagatgccgatcagaacatcaccagttttaaagtcgagctgaagcagggcgacacctataccaaggtgtatcagaaggacacccgcgccaagcaacaggagatcatcctgcttgaccaggcacagcaggcgtccgccgtgaaggtgaccgtactgtccgccgacggcggcaccatgaactgggtcaacgtgggcatcaacgagatttccgtgtactccgcacccaaggagaccgtgctcgacacggccgacacgaaccacatgctcggcgccaccatgaccgcctccagcaacgagacggcgacgctcacccccgacaaggcgatcgaccagaaccgcaccggccgcaacaaccgttgggccagcggctacgagaccccgagcaacatctggctgaaggcggaattcccgcggctcaccgcggtcaaggacatccgcatctatttcttcgagcgtgacgtgaatccgaagcctaccaatgtccagagcttcgacctgtcctacaccgactccgaaggcaccgagcacacgctcaagtccggctacgcgatgacggcctccgggaccggttatgtcgctgacgtcgtcatccagctcgatcaggccgtcaacgcccgctcgctcaagctgtcgaacttcgcgatcaaaagctccgaatacaacaacgtgagcgtcgccgaatgggaggcgtattcgaacgatcaggccgagccgggcgccacgctcgacagcgtggtctccgacctcgaatccaaccacctgaccatcgagaccgacaccgacacgctggctctgcccactgtgcccgacggctacaccgtcaagttcaacggcgccgactacgagcagctcatcgccgccgacggcaccgtcaaccacccgctggtcgacaagaccgtgcaggtcgcctacgtcgtcaccgacaccgccaccggcaacaccaagacgacctccgacatcccctacgtcgtcaaaggcaccaaccagcagcaggaaggcaacaacgccaagccgaccatcatccccgaaatcgccgaatggcattcgaccagtgccgccaagctggcggcctccgccgtgacgaaggtcgtctacgacgatgattcgctcaaggccgtggtcgacgagttcgtcgccgactacaaggacttcaccggcatcaagctgaccgccaagaagggcgccgccgaagccggtgcgttcaacttcgtcaagaccgactccacggccgcgatcgcgcagctcggcgacgaaggctacacgatgaacatccaggccgaccgcgtggtcgccaagtcatccagcgtgaccggcaacatgtacgcgatgcagacgatcctgcagatgaccaagcaggacgccagcggcttcgtgatcggttcgatgcgcgactacccgcgcttcaccacccgcggactcctgctcgacgtggcccgcaagcccgtctcgctggagatgatgcgcgagatcacccgcacgatgcgctactacaagatgaacgacttccaggcgcatctgtccgacaactacatcttcctggagaactacggcaagcgcgacaacgaggacgaggcgttcaaggcctatgacgcgttccgtctcgaatccagcctgaccaacgacaagggcgaatcgcccacggccgaggactactccatctccaagaagacgttcaagcagttcatccaggacgagcgcgccctcggcatgaacgtcgtgccggagatcgacgtgcccgcgcacgccaactccttcacgaagatctggcccgagctcatggtgaagggacgggtctccccgatcaactccaaccgaccgctcatcgaccacctcgacgtgtccaagcccgagaccatcgccaagatcaaggagatcttcgacgactacaccaagggcgacgacccgacgttcgacagcgacacgaccgtgcacatcggtgccgacgagttcctctacaactacacggcataccgtaagttcatcaacgagatcgtcccctacatcaaggacacgaacaccgtgcgcatgtggggcggcctgacttggatcaacgaccacaagacggagatcaccaaggacgcgatcgagaacgtcgagatgaacctgtggtccaaggactgggccgacggcctccagatgtacaacatgggctacaagctgatcaacacgatcgacgactacggctacatggtgcccaacggcagctacggacgtgccaacgcgtacggcgacctgctgaacatcagccgcgtcttcgacagcttcgagcccaacaaggtccgcagcagcggcggctaccaggccgtgccctccggcgacgaccagatgctcggcgccgcgttcgcgatctggagcgacaacatcgacaagagcgcatcgggtctgaccgaatccgacctgtactggcgcttcttcgacgcgatgccgttctacgccgagaagacctgggccgccaccggcaaggagaagggcaccgccgcgaaactcacggcgctggccgccaagcagggaaccggccctcgcaccaacccgtactaccaggccacttcgaagaacagcgtctacgagagctacgacttcaacgacgggctcgccgacgccagcggcaacggccgcgacctgaccatcggcgacggcagcaaggccgccgtcaaggaccagtcgctcaagctcgccggcggctccagctatgccacatccaagctcgacaagctcggcaacggcaacgagctgacgttcgacgtgacgctccagcaggctgccaagcccggagacatcctcttcgaggccgacgctccgtacggcacgcatgacatccgcgtcatggagaacggcaagctcggcttcacgcgagagctgtacaactactacttcgattacgagctgccggtcggcaagacggtcaccgtgaccatcaaggtggaccagcagaccacgaagctgtatgttgacggcgaattcgtgagcgatgcgaccggcaagtacatcgacaagggcatcgagaagaagtccggcatcactgctgcgaccttcgcactgccgctgcagcgtatcggctcgaagacctctgcgatcaacggcgtcatcgacaacgtcatcgtcaagaagtccgaggccgagacagaccagtacaacaagtcctgctggaccggcacgaccaattccgagacccaatacaacgacacggaaggtctgctgcggtacgcgttcgacaacaacccgagcaccatctggcattccaactggaagggcgccacggacaagctgaccggttcgaactcgttctacgccgagatcgacatgtgccagaagtacacgatcaaccagttctccttcacgccgcgtaccagccaggacagcggacaggtgaccaaggccgatctgtacgtcaaggccaacgcgaacgacgagtggaagcaggtcgccacggatcaggtgttcgaggccagccgcgccaagaagaccttcatgttcgacgagcaggaagtgcggtacgtcaagttcgtggccaagtcctcgaacgatggctgggtcgcggtctccgagttcggcgtggcgaacaagccgtcctccaccgtgcgcgtattcgtcgcggccgaaccggccgaaggcggtacggtgagcgtagccgccgagggcgaaaccggcaccgatacggccgtggacgtcgcatccggtgcctcggtgaccgccaaggcggtcgcggcggatggctacaggttcagcggctggttcacgacggccagtgagacggcggtttccaccgatgccacgtacacgttcgcagccgacggcaacacggctctgaccgcgaagttcaccaaggactccacgccggatcccggcccgaagccgaccatcagctcgatcgccgtcaccaagccgaccgtcaccgattacaaggtcggcgacacgttcgacgccactggactggcggtcaccgccacgatgtcggacggcagcacgaagaccctgacagccggcgagtacacgctcgcagccacgcaggacggtgccgcggtcgcgcttgacgaggcgttcgccaaggccggaaaggtcactgtcacggtcaccgccaacggcaagaccgccaccttcgacgtgaccgtgacggccaaggatcccgatccggaacccgcgacgctcaagtccatcaaggtcacgtccaggccggacaaggccacgtacaccgtggatgagacgttcgccaagaccggtctcgcggtgacgggcacctggtccgacggcaagacggcgctgctgaaggacggcgaatacaagctgtccgcggtcgacgccgacggcaagaccgtcgacttgaccaagccgttcacggccgcgggcgacgtcaccgtcacagtgacctccggcaagctcaccgactccttcacgatcaccgtcaaggcaaagaccgtgaccccgactcctggcgacaacaagccgggcgagaacaagcccggtgccgacaagccgaagccgaacacgcctgacgaggtcgccaagaccggtgcttcggtcacggcggtcgtcttcagcgccctgttgctgttgtccgcaggctacctgctggtgcgtaagcgcaggatctgaccgaatcacgtgtcatcccccgcggatgacacgctgagaccctagagggggctcccggttcacgccgggagccccctcttccgttgcgtgcaggtacgtaataacgtggatatgtcattatcgcctactgttgcgtatctaagtgcgcgccgaaacgacgagtccgcgcacttagctacgcaaacggggctatttgcgttcctaagtgcgcacggttgtcgtttcggcgcgcacttaggaacgcaaccgcatctgatgccaacgcactcgctggcggagggctgtccgtgcaacggactagggcccgtcaacagcctccagtaccacccaacaaacaaaaacaggggctggaaaccagttacggttcccagcccctatcaatgtctatgagacgggtctcactcggccttgtcggcggtctcctcggcagcggtctcggcgggcgcctcaaccggagcttcagcggcggcggtctcctcgaccggagcctcggtagcggcggcgaccttggtggcggcctcagcttccttgacgacagccttcttcgggcttaccggctcggtgacgagctcgatgatggcggcaggcgtggagtcgcccttgcgcggagcgatcttgacgatacgggtgtagccgccctcacgctgctccatctgctcggcaatctgagtgaacagcacgtgcacgacggacttgttgcggatgacgcgcatcacgcgacgacgggagtgcaggtcaccgcgcttcgcgaaggtgatcaggcgctcggccagcggacgaaggcgcttggccttcggcagcgtggtggtgatgcgaccgtgctggaacaggctggtggccatgttcgcgagcataaggcgctcatgggccgggcttgacgccagacgcgggcccttcttgggtgtaggcatagtttctccttatagcccgtcggattcaggtgggcacatgcccgaacgtccgaatccgacggttatatctgttgcgaaaggtgacgtcactcgtcttcaggcgagaagaacgtaccaccttccaaattgttggtatcgaagcccagcggcgacgacttcagcgacagtcccatggactgcagcttgtccttgacctcgtcgatcgacttcataccgaaattgcgaatatccagcagatcctgctcggtgtgagcgacaagctcgccgatcgtgtggatgccctcgcgcttgaggcagttgtagctgcgctgcgtgaggttgaggtcctcgatcgggacggccatctcggggttggtctcctccgcgacgggagcgggaccgacttcgacgccttcggcctgcacgttgagctcacggcacaggccgaacagctcaaccagggtggagccagcggaagccaccgcatcgcgcggtgaaatggccggcttggtctccacgtccagaataagcttgtcgaaatcagtgcgctgttcgacgcgcgtggcctcgaccttgtagcttaccttgagcaccggggagtaaatcgaatcgaccgggatacgaccgatctcatcggtgtcctgcttgttcatctgcgcggggacgtagccacggccacgctcgacagtgaactcgatttcgagttcgccgtcgtcggcgagggtcgcgatgtgctggtccgggttggcgatggtgacaccggcgggcggtgtgatgtcgcccgcggtgacttcgccattgccgctcttgcgcagatacatgaccacgggctcgtcgtactcgctggtcagcacgatgcccttgatgttcagcagaatctcagtgacgtcttccacgacacccggcagagtggtgaactcatgcagggcaccggaaatacgcacggaagtgaccgccgcgcccggaatcgagctcagcagtgtgcggcgcagcgaattaccaagcgtgtatccgaaaccgggctcaagcggctcgatgacgaaacgggaacgctgcggattgatggattcctcggtaagtgtcggacgctgtgcgataagcactgtgtgtatcctttcagcttctggacggtggtgcactcaccttccgtaagcggttttggatggatgagattgctgagtgctcagacgcggcgacgcttcgggggacgaacgccgttgtgcgcttgcggagtgacgtcggtgatggagccgacttcgagtccagcggactggagagaacggatggcggtctcacgaccggaacccgggcccttcacaaagacatcgaccttcttgacgccgtgttccatggccttgcgggccgcggactcggccgccatgccagcggcgtacggagtggacttacgggagcccttgaatccgacatcgccaccggacgcccaggacacgactgcgccggacgggtcggtgatggagatgatggtgttgttgaacgttgacttgatatgcgcctgcccgacggggatcgacttgcgatcacgacgacgaggcttgcgcgcggcctgcttaggagctgccattgaccctcgtttccttgtaacgaactgttgttttggattggatccggacgatgggtgtcaccccgtggcccgaatcgacgccaccctattacttggtggccttcttctttccggcgaccgtgcgcttcggacccttgcgggtgcgggcgttggtcttggtgcgctgaccgcgcacgggaagtcccttacggtgacgctggccttggtagcagttgatctggatcttacgacggatgtccgcgtcgatttcacgacgcagatcgccctcgatcttgtaattgccttcgaggtaatcacgcagcgtaatcagctgctcatccgtcagatccttgacgcgaatatccgggttgataccggtcgcggcaagcgtttccttggcacgagtgcgacctacaccgaaaatataggtgagggcgatctcgatgcgcttctcattggggatgtcgactccggcaagacgtgccattgcgattccttctgtgttcacgcaggtcgtgcaccgagtcttccggttccccggcccgggcctgcgtacccggggttcagctgttcgctgtgactcagcgccttatttatttgttgccgctggaatctgctctcagccctggcgctgcttgtggcgcgggttcgtgcagatcaccatgacgcggccgtgacggcggatcacgcggcagttttcgcagatcctcttcacgctagggctgaccttcatggttttcctttgcttgtacctatttacttgtaacggtacgtaatacgtccacggttcagatcgtaggggctcatttccagcacgacgcgatcctgcggcaggatgcggatgtagttcttccgcattttgccggaaatcgtcgccagcacgatgtgcttgttctcaagttcgacgcggaacatcgcattcggcaatgcttccactacctgaccttcgacttcaatcacaccgtcttttgccataagccttacagtccattccttgggcgtattacacttgtatgtccgaagacacaccaaatttaaagaatatatcataacgggtcacgacacgccgaggcgtgcatgacccgttataatttcttgctttatccttgctcctgccggcgatacgaccggcagcggcaatcagtcgctcagcgcggcgacgatgttggcctgaatggcgtcgatgtcgccgacgccgtcaatggcgaccagctggccgcggctcttgtacgtgtcgagcagcggagcggtttccttggcgtacgtggccagacgcttggcgatggcctcgggggtgtcgtcagaacggccctgctcctgcgcgcgcttggcgatgcgctgcatcagcacatcgtggtcggcgtcaagggcgacgaccttgtccagcggcgtgccgagctcttcgagcatcgcgtccagcgccttgacctgggaggcgttgcgcgggtagccatcgagaatccagccgttcttggcgtcatccatggccagacggtccttgacgatcttgttggtgagctcgtcgggcaccagttcgcccttgtcggtgtacttcagcgcctcaaggccgagctcagtcttgttcttgatgttgtagcggaagatgtcgccggtcgagatggcggggatgccgtagtgctcggcgagcagggcggcctgggtgcccttgccgacaccttgcgggcccataatcagcagtcgcatgtggtctccttggtgaagtgaatacgttatatatgttcgctcccgtaaaagcgggagcgcagaaggatcagccttccttgtggtcgatgccttcgagcaggaagccggtgtactggaactgctcggtctgggccttggcctgacgcagcgtgtcaaggccaacgcccgcgatgatcaggatcgtggtgccgccgaacggcagcttggagttgaggttcagcgccatgatcagcacggtcgggatcagcgcgacgaacagcaggtacacggcaccgaccgtgttgaggcggttcatcacgtagttcaggtaacggctggtggcgttgccggcgcggatgccggggatgaagccaccgtattccttcatgttgtcggcggtctcgtccgggttgaacgtgatcgacgtgtagaagaagcagaagaacacgatcatcagcgcatacagcgcgatgtaccacaccgaagtggtgttggcgaggttcttgttgatccagtcgacccaggactgtcccgacttgccgaactgcgcgatcagcgtcgggatggccaggatggaggacgcgaagatcggcgggatgacaccgctcatgttgatcttcagcggcaggtaggtggaggagccaccgtacatcttacggccgatcatgcggcgcgtgtactgcacggggatgcggcgctggctcagctcgacgaagtcgacgaagacaaggatgaccaccagcacgccggtgacgatgccgaacttcagccaatcgccgttggtgccgttggtgccccaaccgatctcccacagctgcggcaggaagccggagcagatggacatgaagatcaagatggacataccctgaccgatgcccttgtcggtgatcaactcggccatccacatgatcaggccggtaccaccggtcatgatcagaaccatgacggagaggttccacacggagttgtccggaatcggcgaggagcacatgttgttgaacagtgcgccggactgtgcggtcaccagaatcgtggtggactgcagcacggccaggccaatggtgaggtaacgcgtgtactgcgtcagcttggcctcaccggactgtccttccttgtgcagcgcctcgaagcgcgggatgaccacgcgcagcagctgcacgacgatggaagcggtaatgtacggcatgacacccagcgcgaaaatggacagctgcaacattgcaccgcccgagaagaggttgaccaagccgatgaagttttcctggctaccgctaagtgtgttgatacaatcctgcaccgtcttgtagttgactcccggcgtcgggatgaacgaaccaatacggtagatgatgatcatggctaaggtaaagaggatcttgttcctcagttccttggtccgaaaggcttggattaacgtcctcacaaggattcctttccgttgtgcgcgcccggcgcaccgaagcaaacatactctaaccgtcgagtctagcgtacggggtctacccgcagacacgctggtgtcatatgtcatatgacgagtcgtaatgacagataaggccctcgcccgcgacatgagcggggagggccttatctcattggtcacatgcagtgttgccgaacaacaatcagttttcggaaacagagccgccggcggcctcgatcttggccttggcggaagcggatgccttggcgcccttcacggtgacggccacggtgatgtcaccatcgccgagaaccttgaccgggaaaccgccacggacagcgcccttggcaaccagcgcgtcaacggtaacctcgccgccctcagggaacagctccccaagagcggagacgttgacaacctggtattccttcttgaacgggctcttgaagccacgcagcttcggcaggcgcatgtacagcggcaactggccgccttcaaagcccggacgaacctggtagcgcttcttcgtacccttgtcgccacgacccgaagtcttacccttggagccttcaccacgaccgatgcgagtacggtccttcttggcacccggggcgggcttcagattgtgcatctgcaggagttcatcttcgttggccataatcagtcagcctcctcaacggtaacgaggtgacgaaccgtgagaatcatgccgcgggtaacggagttgtcctcacgaatcacgctctggccgatcttgcgcagaccaagggactgggcggtcgcgcgctgcttgggcgtgcggttcaccagaccatggtgcaacgtgatcttcaggttagccatcactcaccatccttctgttcagcggcggccttggcctgagcctcttcacgagccttcttggcctcggcgatgccggcggcgcgagcgcgaagcatcgcatcgggggcgacctcgttcagggcgaggccacggcgggcagcgatctcttccggctcctcaagctgcttgagggcggccacggtggcgcgaaccatgttcacggcggtggcggagcccatcgacttggtgaggatgtcggtgatgccggcgcactccatgacggcgcgcacggggccaccggcgataacgccggtacccggggcggccgggcggagcagcacggtgccggcggcatcatggccgatcaccgggtgggtgacggtaccacggatgcgcggaacggtgaacatgtgcttcttggcgtcgagctggcccttggcgatggccgccgggacctcacgggacttgccgtagccgacaccgacggtgccgttgccgtcgccgaccacaacgagggcggcgaagctgaacgtacgaccacccttgtgggtcttggacacgcggttgatggtcaccacgcgatcgagcatctcgtcgccgtggttctcctcacgacggttgcgacgctcgccgcgtcggccttcgccacgctgtccacgacgggacttgcgctcatcattgttgttgttctcgggtgccgcagtgttctgagtctcttcagccacttgggtttccttcacttcgttgtcgctcacagtgccagacctccctcacgggcgccatcagcgacggctgcgacgcgaccggtgtacttgttgccaccgcggtcgaacacgacctgctcgatgcctgccgccttggccttctcagccaccagcagaccgaccttcttggcggcctcggacttggtgccctcgaagccagcgaactcggcggtcagcgtggaggcgctcaccagggtgtggcccttggtgtcgtcaacgatctgagcgaccatgtgacggttggagcgggtgacgacgaggcgcggacgctccggggtgccgacgaccttcttgcgaagacgagcgtgacgacgaaggcgcgcgaccttcttgcccttacctagaatcttgacgctcatatcacttaccagcctttccggccttgcgcaggatgcgctcgtccgcgtacttgatgcccttgcccttgtagggttccggagcacgcagcttgcggatgttagcggcgacctggccaacgacctgcttgtcggtgcccttgacgaccacttcgttagcgttcggcagttcgaaagtgatgccttccggcgggttgacggtgatcgtgtgagagtagccgagagagaactcgatgcccttgcccttggcgacggcacggtaaccggtgccgacgatgagcaggcgcttctcgaatccatcgtgcacacccttgaccatcgaggcgatgatcgagcggctcagaccgtgcttggcacgggtgggacgcaggtcatccgcggcggtcaggataatctcgttgccttcgacctgagcggtgatgccctcagggatgacgtaggaatcggaacccttcgcacccttggcggagaagttctgaccctcgatagcgacttccacgccagccgggatggtgacggggagcttaccaatatgcgatgccatgtgtcagctctcctttctcaccacacgtaggcgacgatctcgccgccaatgccccggtcgaggcattccttctgggtcatcagtcccgagctggtcgagatgatggcgatgccgaggccaccgagcggcatcggcagggagtcggacttcgcgtagcgacgcaggcccggcttcgaaatgcgcttgatgccctggatggaacgctcgccgttcgggccgtacttgagggtgacctcaaggtcctggccgaccttggcttccttggcggtgaagtccttgatgtagccttcgcgcttcaggatctcggcgatgttcgccttgaacttggagtacggcatttccacggtctcgtgctttgccgcgctcgcgttacgcagacgcgtgagcatgtctgcgatcggatctgtcattgtcatgtgggcttgttgccctttctcgccgtggtttccgccgccctagcgcctgcactgcagacgttcgggccgcggaccttcagcgtcgatgtttaccaactggacttagtgactccgggcagctcgccgcggtgggccttctcgcgaaggcagatgcggcacaggccgaacttacggtacacggagtggggacgaccgcagacctggcagcgcgtgtaggcgcgcaccttgaacttcggcttgccggccgccttgttcttaagagcggtttttgccatatcagttctccttgaaggggaagccgaggtgcttgagcagcacgcttgcttccttgtcgtccttggtgctggtcaccacggtgatgtccataccacgctggtgatcgatgctgtcggggtcgatctcgtggaacatggactgctccgtgaggccgaagttgtagttgccctgaccatcgaactgcttgccgttgatgccgcggaaatcgcggatacgcggcagagccagcgtcagaaggcgatccaggaactcccacatgcggtcgccacgcagggtgacgtacgcaccgatggcctggccttcacgcaggtggaactgcgcgacggacttcttggccttggtgatcttcggcttctggccggtgatcagagtgaggtccttgacggcgccttcgatgagcttggagtcgcgggccgcagcgccgacgcccatggagacgacgaccttctggacacgagcgacctgcatggggttggagtacttgaactccttctccagttcaggaacgatgacgtccttgtactgctgcttcaagcgcggagttgccggcgcctcgatagtgctatcggtcatgccagctcctttccggacttcttggcgacgcgcacgcgcacggtcttcaccttgccgtcacgagcctcctgcttaacattcacgccgacgcgggtcggctccttggtctccgggtcgaccagcatcacgttggagcgatggatcggggcctccacggagacgatgccggactgctgtccctgctgcgtggcgcggacgtgcttcttgacgatctgcacaccctcgacgatcagacggtcgttgggcagcacgcgggtgacggtgccctccttgccgcgatccttgccgcggatgaccttgaccaggtcgccgctcttgatcttggctaccatgtcagatcacctccggagcgagggacacgatgcgcatgaagcgcttgtcgcgcagttcacgggcgatcggtccgaagatacgagtgcccttcggttcacggccggagccgagaatgacggcggcgttctcgtcgaacttgatgtaggagccgtcgacacgacggtgctccttgacggtacggacgacaacggccttgaccacatcgcccttcttgaccgacccgccagggatcgcgtccttgaccgaggcgacaatgacgtcgcccaggccggcatagcgtcgcttcgatccaccgagcacgcgaatggcaaggagttccttggcacccgtgttgtcggcgacatgaagccgcgtttcctgctgaatcattgattctccttagccgagctggttctccccgagcaccctgcctgcctataccagcgcaggcagggtgtctcgcggagccttgccgaacttgtttacttggcgcgctcgatgatggattcgagacgccaacgcttggtcttgctcagaggccgagtttccataatactcacgaggtcgccaacgtgggcgtcgttgtgttcatcatgggccttgaccttcttggtggagcgaacgaccttgccgtacagcgggtgggtcgaacgctgttcgagctcgacggtgatggtcttgtccattgcctcggacacgacataaccgcgacgaaccttgcggaagttgcgctctgtagtatcagccatgcttacttctcctccgacttggtctcggtagcctcaggctcctgactgatgccgagctcacgctcgcgcaggacggtgtacatcctggcgatgtcgtgcttgaccgccttgaggcgggcagtgttgtcgagctgaccggtggcagcctggaagcgcaggttgaacagctcttccttggacttcttgaggaagccctcgatctctgcgttggtcttctcgttcagattcttgattgcgtaatcagcggtaccgactgccatcagatatcaccaccttcacgtgcgataatgcggcacttcatcggaagcttgtcgatggcgcggcgcagagcctcgcgagcgacttcctcagacacgccgccgatctcgaacatcacacggccggggtggatgttggcgatccagaactcgggggtacccttaccggaacccattcgggcgcccagcgggtgcttggtcagcggacggtcggggaagatgttgatccacacacgaccaccacgcttgatgtagcgggtcatggcgatacgcgcggcctcgatctgacggttggtcacgtacgccggggcaagcgcctgaatgccgtaatcgccgaaagcgatttcggtaccgcccttggacatgccagagcggcccggacgatgctgcttacgatatttggtcctctttgggataagcatcagctcactccttcgtttccgttgcggcaggagcctcggcggcggcctgggcctcagccggagcggcttcggtcgcagccttctgctgagcgccggcggcacggttgccacggcgcgggcggcgatcgccgcgacggccctgacggttgttgttctgctgcgcctgctgctcttcgaactcacgctcggtcatgtcgcccttgtagatccagaccttcacgccgatgcggccgtaagtggtcttggcctcgaagaagccgtaatcaatcagagcgcgcagggtctgcagcggaacgcgaccttcgcggtagaactcggaacggctcatttccgcaccgccgaggcggccggagagcttgatacggatgcccttggcaccggcgcgcatggcgtcctgctgggccttgcgcatggcgcgacggaaagtgacgcggttggtcagctgctccgcgatgccctgagcgacgagctgggcgtccagcgcggcgttcttgacttcgaagatgttgagctggacctgcttgccggtcagcttttcgagcttggcgcggaccttctcggcctcggcgccacggcgtccgatgacgatgcccggacgggcggcgtggatgtccacgcgcacgcggtcacgggtacgctcgatgacgatacgggacacgcccgcacgctcgagatccttgttcatgaccttgcggatcttgtcgtcttcgagcacgaaatcactgtagcgctcgccgaccttgttggaatcggagaaccacttcgagcgatggctctcagtgatgcccagacggtatccgaacgggttgatcttctgacccatctcagcgatccccttccttgttggcaacgatgaccgtgatgtggctggtgcgcttgttgatacgagcggcacgaccctgcgcacgagcacggaaacgcttcagcgtaacgccctcgtccacataggtcgtcttgacgaccaggtcattctcgcggaacggctcaccggccttgtcggccttgacgcgagcgttggcgatggcgctctccagcaccttgcggaccggaagggccgcggcctggggggcgaacttcaaaatggtaacggcttcggtggccttcttgcctcggatgaggtcgaccatgcggcgagccttgcgcggcgtcacgcggacgtgacgagcgattgctttagcttccataagtcattctctcctttagcggcgggccttcttgtcgtccttcacgtgacccttgaaggtcttcgtgggggcgaactcaccgagcttgtgaccgaccatagcctcggtgacgaacaccgggacatgcttgcggccgtcgtgaacagcgaaggtgtgtccgatgaaatcaggggtgatcatcgaacgacgagaccacgtcttgatgacgttcttggtccccttctcgttctgctcgtcgactttcttctgcaagtgggcgtcgacgaaggggcccttcttgatgctacgagtcatcttctcgatactccctttacttgcggttcttaccattcggacgacgacgaacaatcatcttgttcgaggccttcttcggacgacgagtacgaacctcacccttgccccacggcgaaaccggcggcttgccaccgcgggtacgaccgccgtgcgggtggtcgacggggttcatggactcaccacgggtccacggacgcttgcccatccaacgggcgcgaccggccttgccgagctgaatgttggcgtgctcggagttgccgacctcaccgatggtggcgcggcagcgagcatccacattgcggatttcgccggacggcatacgcagctgggcgtaggcaccgtccttggcgacgagctgcacggcggcaccggcggaacgcgcgatcttcgcgccgcccagcggacggagctcgatggcgtgcacgatcgtaccggtcgggatgttcttcagcggcaggttgttgccgggcttgatatcggccttctcgccggtctcaatggtgtcaccctgcttgatgccctcgggggcgatgatgtaacgcttctcgccgtcggcgtagtgcagcagcgcgatgcgagcggtacggttcgggtcgtactcgatgtgagcgaccttggccggcacgccgtccttgtcccaacgcttgaagtcgatgagacggtactggcgcttgtggccaccgccgcggtggcgggaggtcatacggccgtaagagttacgaccgccggtcttgctgagcttgcgaaccagcgacttctcaggcgtggtgcgcgtaagctcggagaagtccgagacggacgcgttacgacggcccgcggtcgtcggcttataaacgcggatagccataatatagttcttcctttaacttttctcggctaaccttcagttgccaaagatgtcgatcgactggccctcggcaacggtcacgatggcgcgcttctgggaaacacgctggccgaaaccggtgcgggtgcgctggcgcttgccggcgcggttgagggtgttgacgttcgtcaccttgaccttgaagatctcttcgatagcctgcttgatctgcaccttgttcgcgttcggggccaccacgaaggtgtactggccacgatcggacagggcgtagctcttctcagagacgacaggcttcaggatgatgtcatgtgctggcttgtgaatagcgaccatgatcaggcctccttggcggccggcttggtcttcgcgtcgacgaaggcctcaaggccttccttcgtgaagacgacgtactgagccgtgaccacatcgtacgtgttgagctgatcggcgaagatcgggtgaacggtcgggatgttgcgcaccgacagccactcgttgacgttatcgcgggagaacaccacggtggtgaacttgttctcggtcaccggggtgagcgcggcgatggcggccttggtcgacggggtgtcggtgacaccgaagtcaaccacgacgacgcggccggcgttggcgcgatcggaaagcacgtagcgcagggccgcggccttcatcttcttgggggtgcgctgcgagtagtcgcgcggctgcggaccgaacacggtgccgccgtggtaccactgcggtgcacggatggagccctgacgggcacgaccggtgcccttctgcttccacggcttcttgccgccgccggaaaccatgccgcgggtcttggtggcgtgcgtgccctgacgggcggcagccagctgggccacgacgacctggtggatcagcgggacgtgagcctggacctcgtcggcggtgtggccgaagagctcggcgggcgcctcaacggagccagtggcctggcccttgccgtcagtgacgttgagagtaacgtttgccatgataatcaggctcccttcactgcggtgcggacgaggacgatgccgcccttggggccgggaatggcacccttgatggcgaggacattgttctcggcatcagcggacatgacggtcaggctctggacggtcgcggtcacgtgacccatgcggccggccatgcgcttgcccttgaggatacggctcggagtggcgcacgcgccgacggagccggggcgacgttcgttcttgtgagaaccgtgggtacggcggtaggacttgaagccccagcgcttgatcgtgcccgcgaagcccttgcccttggtggtgccggtgacatccacctctgagccctcggcgaaagcgtcgatggacagctcttggccgggctcgtactcggcggcgtcctcggtgcgcacctcaacgaggtggcgacgcggggtcacgccggccttggcgaagtgaccagcgagcggcttggtcaccttggtgggatcaatctggccgtaaccgatctggatggccttgtagccatcggtctcctcggacttgacggccgtgaccacgttggtggacacatccaccagcgtgacggggacgaagaagccgttctcgtcccacacctgcgtcatgccgagtttgcgacccagcagagccttgtggctacctctttgcgaagtcataacgatccctcctcccttacagcttgatctcgatgttgacatctgcaggcagatcgatgtgcatcagagaatccacagccttgggggtggggtccacgatgtcgatgagacgcttgtgcgtacgcatctcgaaatgctcgcgagaatccttgtacttgtgaggagaacgaataacaacaaacacgttcttctcggtcggcagaggaaccgggcccaccacagtggcacccgcgttcgtcaccgtctcgacgattttcttcgccgattggtcgatgacctcatggtcataggacttaagcctgatgcggattttctgtcccgccattgccgtccgccctttctagcgattcgttgactattaccatcctgctaaagggcaccggcgagcatgacacacgaaaatacttttcgcggccataaccacatcagtgcgtagacatgcaagaagcccgtcgaaacggaccccttgttccacgctcgcttttttgattccaatttgcgagcccaaaacaggcaacttgttaattaaagcaccaggggtacctatagggaattcgggcgtgtcgcacgcccgaatcctgtcatatcccctcagggctgccgcccctcggcgtcgcctaccggcagcccaccgggctaccggccacacggctccgcgggcgtgtcgcacgcccgaatcccgtcatatcccctcagggctgccgcccctcggcgctatctacgtttcgtgaggttgtcagagcacgataccctcggtatcactgtcctacggttgttggaatcatgcggttcccggagcgcctctactctgccatcaacccctcgaaatgcagatagcccattattctcacctctcagtgcgccgatacacctatccgtacgcgattttcaatggactatcgggaaaggcagtagccaaacggccccgtgcacggttttcgtgctgtacgatgacaaccaacttgggagagacattcagggaaggggaagattccactctgccaggctttcgtgcaccaatatccacaatccatgcccgaaggttcggaaacggtcagtattacgagaacaccagcggcctcgacgtgcaggcgaagtggaagagctgtacgacaccaccgacgtcagcaacccgtggtggaagtacccggtcaccggcgatgagaacgagaccgatctgttcggcggtgcttccgcggcgtacaaccgcggcgcgcccgccctcgccgcgttgcgttcgacggtcggcgatgcgaagttccgtgagatcgagaagacctgggtgtaggaacatcaggagcagttcgacccgactggtctgaagattaccgcgacttactccgacaagtccacgaaggccatcgacgcagccgaacggcgtgtccaacccgctgtccaagaccggcgccagcacggctccgatcatcgccctggcggcactcgcactgctgacgggcggtgccgccgtggcgaaacggcactcggagcctgaaccgcagcatcggaggtagccgcgagcgcctgagtgatactgggcggcgtcaacgcggacaccgtatggctgttcgccgcctgggtgctgtgctattgcgtgcagttctccgcggcgcgatggttcaaatcacggttcgcccgccgttggatgccgccaacgatcgtgtattcggcggccttgtgcgtggtcggactgccattcgtcatcatgcgtccgggcgcgctgcggtgggcgcctttgtttgtcgtgctggccgggctgtcattcctcgccgcatggctgcgccgggagcgctcgctgtggggcaacgacggccgaaaccgatgatcgccggcgtcaccgaagcgatgtgcctgctactggtgttcatagcggtcatcatcatctgtcctcacctggcatagcggcgatccgcctcccccttcctatccgactccctccccgaccatagtcccatttcagaggccgcagatgggactttggcgggatgaggtggctgtgttgttcgtgaggcaggtcacagcgcaagcgctcccctatgtgaagcccgcgttgaagcgccccgcgtgctgcattatcgtaatcaccgtgacaaaatcgcaagctgcacagatcaaacccatcacggcgcatcacgccaaccagctgtaccagcacggcacgctggcgctgctggtgcccggactgctcgaaggcaccacgaccatcggcgaactgctcacccacggcgacaccggcatcggaaccggcgaagggctcgacggcgagctcatcatcctcgacggcgtcgcctataaggtcggacaaagcggcgtggcggaacgcgtgccggacgatttcaccatgccgttcgcgaacgtgcatcacgccgcgttccaataccagtgcgagcgccgcgatatcggcctggaggatctcaacaaccgcatcgtcgaggcgaacggccgcgccaacacgttcttctcggtcatcgtacgaggcaccttcagcttcatcaagacgagggcggtcatcaaacagcaggccccgtacccgactctggtggaggtcgccgaccggcaggcgatgttcctgcggcacgacgtgaagggcacgatgctgggatatttctcgccggagatgtttcatggagccgccgtcgccggttttcacgagcattttctgtcagacgatcgcacgttcggcggtcacgtgctcgacgcggtgctcgatcacggcaagatatacagtcaggtgttcgacacgctggtgcagcatctgccggtggatgatcctgagtatcgcaaccacgatttccggcatgatccgatagccgaggcgatcaccgccgcggagggagacaaggcaggtaattgacggattcagtgggtagtcgcgaagagaagattagtggaggtaatcactgaatccgcgtgaccacccaccggcactacgtgccacctcccgccagcgggaggcaggaatgggatgtaataattgtgggggccttccgcataggaagacccccacattggttcaatcacctgggatgggtgatgtcatgccatcgtcagacgcgctcggacgcctcttcggtggcggccacgccctcgcgctcgacgcgaatcttgtggccttcggcctgcggcacgccgtagtatgcggccacggcgatgtccttcatgtcctcgatcatcgggatgcgcgggttggccggggtgcactggtcctcgtaagcgcgcatgccgatctggtcgagcacgctccagaagtagtcctcttccacgccgcagtcctggaaggacttgttcatgccgagcttgttgtcgcggtagtcctcgacggccttcgccaggttctcgacgccttcggccggggtcttgcccgggtcgatgccgatgatgcgggcgatgtcctggtagcgcttgtcggcgacgtacttgttgtacttcggccagctggtcggctcctccgggacggcaccgttgtagcggatcacgtacggcagcaggatggagttggtgcggccgtgggcgatgtggcacagggcgccgatggtgtgggccatgccgtggcacatgccgaggaacgcggagccgaacgccatgccggccatggtggcggcgttgtgcatcttctcctgcgcgtcggtcttggcgagacccggctcgccgttgacggactcggccaggttgtcccagatgagcttggccgcgtgcagggccatgccgtcggtgaagtcgttcgcgtacacggacacgtaggcttccatggagtgggtcagggcgtcgaagccggcgtcggaggccagcttgcgcggctgggtgcgggccagcaccgggtccacgatggccacggacggggtcagcgcgtagtcggtgatcgggtacttgtatccggtcttgtggtcggtgatcacggcgaacggcgtcacctccgaaccagtgcccgacgaggtcgggatgcacacgagcttggccttctcgcccagcggcgggatgcggaacgcgcgcttgcggatgtcgaagaacttctcacgcacgtcggagaaggagatttccgggtgctcgtagagcagccacatgatcttggccgcgtccatcggggagccgccaccgaccgcgatgatcgtgtcgggctcgaactcctcgcgcatcatctcggcgccgcgctcgacggtctcgacggagggctccggctcgacgtagtcgatgattcggaaggtgacgcgattgtcacgggcgcgcagctggtcgatgaccttgtcgacgatgccgagctgctccatcaccttgtcgcacacgatgacggccttctcgatgccgtgcatgtcgcgcaggtacttgatggcgttcggctcgaagtacgtcttggccggaatcttgaaccactgcatgttattgttcctccgagcgatgcgcttgatgttgatcaggttcacggcctggacgttgccggacaccgagttgccgccgtaggagccgcagcccagggtcagcgacggggcaatcgcgttgtagatgtcgccgatgccgccgagcgagctcggctggttccagatgatgcggcaggcgtgcatgcgcaggccgtactcgcgcaccagcgcctcgttgttcgtgtggatggcggcggtgtggccggcaccgagcttgagcatcttctcgcacatctcgaaggcctgctccttgtcgtcggccttgagcacggcctgcaccggggcgagcttctcgtgggtcagcggctcgtcgtcggagacctccttgcattcggcggcgaggatcgtcgcgtcggcggggatctcgaagccggcggccttggcgatgaactgcggggacttgcccggcaccacggagttgaggaccggcttctggccggagccggcggtgcagccgaacatgtactgctccagcttcgccttctcgtccgcgttgacgaagtatgccttgcggcgcttgagctccttgacgagcggcgcgtagacgtccttgtgggcgatgatggcctgctcggtggcgcagatcatgccgtaatcgaagtgcttggagaggatcaggtcgttcgccgcacgttcgatgtccacatcggtatcgatgtaggccggagcgttgccggcgccgacgccgagggcgggcttgccagaggagtacgcggccttgaccatgccggggccgccggtggccaggatggtggcgacgcccgggtgcttcatcagcgcgccggtcgcctcgatggacgggtgttcgatccactgcacgcagttctcgggtgcgccggcttcgatcgcggcgtcgcggacgatcttcgcggcggccacggacgacttctgggcgcccgggtggaagccgaacacgatcggacagcgggtcttgagtgccagcagcgacttgaagatggcggtggaggtcgggttggtgaccggggtgacaccggcgacgacgccgaccggctcggcgacctcgtcgatgcccatgacctcgtcctcgcggatcaggccgacggtcttctgcccggccatgtagtgagtgacgtgctcgcaggcgaagatgttcttggtggccttgtcttcgacgagaccacggccggtctcatcgacggccatcttcgcgagcaccagatgcttgttcagggccgcgacggacgccttggcgacgatgcggtcgacctgcttctgatcgagcttctcgaactcgtcaagggccttgagacccttcttgacaagggcgtcgacctcggcttcggccgccgcgcgcttctcctcggggctcggcttggcgggcgtctcgacctgtgttgcttctgccatgaatactcctcgactagctgtggtttcattccgttgtcgttgccgccatcacctggcggatcatccatccacatgctcgctattgcgcatctgtggcctacgtcacaatctacgtgatacactgcgcaaacgcacacgaacaaaaacgacggcgtttcgtgtttgtttttggtatttatttgttgctatttgttacatttaaccctgttttgctgccgatattccacgaaatgatatcttttgttcgctttttgcgacatcgcacaccatcaaacgaatttccgcgacacaacttatataaagcatgtttataaaagttgcactcgtcgacaaacttttataaaattatttattaaaagcggtgtcatgcgtccggcaccacacggaatcgacccagcaacgaggccccaatgacgaccacggacaccgacatcgccgcaacccgaaacatcaccaagacgcgcaacaggcaggccatcatccgccacctcgcaacgcacggcaacgtcaccaagcgccagctgcagctcgatctgcagctgagcctgccgaccatcaccggcaacatccgcgcgctcgaacacgacggcatcatcgcccccggccccctgaccgactccacgggcggccgcaaatcccaaagctaccggttcaacccgagtcatcgcaccgcaatcggcgtcaccatgcaccgcagcaccctgcgcctatgcgccatcgacctgcaggggcgccccattgccaccctctcgcgcacgctcccctatgccaacaccaacgcctactaccagcggatgggttcggcgatcaacgatttcgccgcggagaccgaaaaggcccacggccccgtgctcggcgtatccttcgccatccccggtgccatctcggccgacggcaccgtcatcaccttcaacgactcgaccggagcgaccggcgtcaccatcgacaccatcgcccagtcggtgcgctacccgcgtcaactaatccgcgaggccgcggccatcgccatgaccgaaacgctgcacgacgccgccatcagcgacgccatatgcctgtacctgaaccgcagacccagcggcgcgctcatcatgaacggccgcctgcaccgcggcccgaacctgtgcgatggcgccatcgaacacatgacgctcgtcccaggcggcaaaccgtgccactgcggcaggcgcggctgcatggccgcctactgctctcccgaaaacctgccggaggactacgagagcatccccggcttcttcagcgtgctggagcaaggcgagacccatcaccgcgagcgcatgaacgactggctcgaccacgtggcgctggccatcgccaacgtgcggtgcgtcatctgcgccgacgtcgtcatcggcggggaggcggcgctgtacctcgaccacgacaacatcgccgacctgcagcggcgggtcacggccctcagcgtattcggcaccgaccatttcacccttcggctgagccgcagcgacgagaacagcggcgccatcggcgcggccatgcagttcaccgacccctacatggacgcgctgtgcggctgggacacgggcccgcacccgtcctcgcccgctccgacacggacgaaaatcgacaccgctacaatgggtgtatgaaacacgcgatacctcagcggtatgcaatccctcatcgctatgcgacacgaccgggcctgtacttcacggaagacggcggcgccgatgtcatcgtccgttccgaaacagccgatcaggtgtggctctgcatctacgagaaggtcgatcaacccaccgccttcttcaacgacgccatccgcatcttcgatgattcagcaacgccgttcatcaacgaaatacacgagcacgccgtctgcacgcgcatcatcgagcccatgtacgtgcgcgagacgctgttccgcatggatgggccgaactacggcctgtggtacgtgcatcttcccaaggcgtgggacggcatgcgctacgcctaccgagtggacggcgcgtgggatccgagcaaggggctgcggttcaacccgtacaagctgctgctcgacccgtatggcaaggggatcgacggccgcatgaagctgtcgccggccgcgttctcataccagtgcgacgtcagcgaggacggcaaggtgcgcggctccgcgttcgggccgatgagcaccgtcgacgcactgggcaacatgcccgtgtcggtggccatcgacgaccgggacaagaccaagcacgacgccgacccctcgcacccgcacgtgccgtggagcaagaccgtgctgtacgagctgcacgtcaagggattcaccgcgaacgcaccctggctgcccaaggaactgcgcggcacgtacgcgggtctcgcccacccgaccacgctctcgtacctgcaatccctgggcgtcacctccatcgaactgctgcccatccaggccaagcaggacgagctgttcctgcaggagcgcgggcggcacaactactgggggtactcgccactcagctacttctcccccgagccttcgtacgccactgccgaagcccagcgcaagggggcccgggcggtccgcgacgaggtcatcggcatggtgcgcgcgctgcatgaggccgggttcgaggtcatcatggacgtggtgtacaaccacacctgcgaaggcggcgtggaagggccgacgacatgctggcgcggtctggacgcgctcttgtattaccggcgtcagaagggcaatatcgggcggcttgaggacaccaccggctgcggcaacaccttcgacttcaccaacacgcacgtggtgacgttcgccgtggactcgctgcggtattgggccaagcgcatcggcatcgacgggttccgattcgatctcggcgtgtcgctggcgcggctggacggggacttcaccaagcatcacccgttcctgtatgcgttgcgttccgacctgctgctcggcaacctgaaactcatcatggagccttgggacctggggccgcagggatggaggaccggcggattcggcatgccgttcagcgagtggaacgaccggttccgcgacacggtgcgccgattctggatcaccgacacccaaccgggggcgcccagcggtatcggcatgcaggagatggccacgcgactgtgcggttcgtccgacctgttcgccacggagcccgggcgcggatgcgtgtcctcgatcaactacgtctcgtgccacgacggattcacgctcaccgacctgacccgatacgcggtcaagcacaacgaagccaacggcgagaacaatatcgacggatcgaacgtgaaccactccgcgaacttcggtgtcgaggggccgtccgacgacccggcgatcatccgcaaacgcgagcaggccgccatgaacatgctcggcacgctgatgctgtcgctgggcacgccgatgatgctggcgggcgacgaattcggcaactcgcagagcggcaacaacaacgcctatgcgcaggacaacgacatcacctggctgaactgggactggatgtaccagacccgcaaaaccatgcagatgcaccgcctggatacggtgtcccgactgctgtcgatacgcaagtcgctgggactgtaccatcacgaggagttcttcacgcggctcacgcagctcggcctgttcaagccgtcgagccgcgtgcaatggtatctgcccgacggcaccacgccgatggatcgggactggttcgacacgacgatacgcagcttcgcgatgcgactgctctcgcaggatgaggtcgatgtgctcatcgtgatcaacggcgtcgacgaggtacgccggttcaccctgccgagcgactgctcctggcagtgtgactggagttccgcgaccgcggtcggactgcggccggcgccgggcgatcggctgcagcgtatcggcaagaaccaggcgctgcgcagcaactggaccatgtccgtcagcgagaaggacaacatccatcagctattgaagaccattcaggcgtcgctggccgagcaggacaagctggatctgtttggcgccaccacagagcatgccgatgtgctgttcgaggatgacgagcaggccccgggcgttggcgcggatgtttcggcgaccatgtctgcggccagtaccgtgcatggcgcttccgcgtcgacccgtgatgacggcaacgctacggttaacgggtcggcggtatggacgatgcccgcactcagcatcagcgtgatgcgcaggctgcagtagaggtgctcataacgaacgaggccctttcgggaaacgatgtttccgaaagggcctcgcgatagccagaactggcgtatattaacgcttcgagaactgcggagcgcgacgtgccttgtgcagaccagccttcttgcgttccacgacacgggagtcgcgggtcagcatgccggccttcttcagggcggcgcggttggcgtcacggtcgatggcgttcagagcgcgggcaacgccgagacggatggcaccggcctgaccggtggtgccgccgccgtcaacgaggacgatcgcgtcgaacttgccttcgagcttgagcagcacgatcggggagttgacctcacgctgcagcagcttggaggggaagtactcctccagggtgcgcttgttgatggtccacttgccggtgccgggaaccagacgcacgcgggcgacggcttccttgcggcggccggtgccgtagcccggagcaatcgcggaagtgccggtgccggcacccgcgttggtctcggtggtgtagctggtgagctcctcttcggttgcctgaaccgcggagtcgttggtgttttcagccatgattctctatctcccttcggttcacttggcctgctgcgagacctgagcgatctcgaaaacctgcggctgctgcggggtgtgcggatgctcggcaccacggaagatgcggagacggtccagctgcaccttggacagacggttcttcggcagcatgcccttgacggcagccttgatgatgcgctccggcttgttcgccagcagctcggcgtagctatcgcgacgcaggccaccgggacgaccggagtgcgagtacagttccttgcccatcttgttgccggtcagagcgatcttgtcggcattgatgatgatcacgtggttaccggaatcggcgtgaggcgcgtaggtcggcttgttcttgccgcgcagcagcgtggcgacctgagtggccagacgaccgagcaccacgtcggtggcgtcgatgatgtaccagtcatgagtcaaatcggctggtttcggagtgaaagttttcactggtgtaccttttcttgcttattgtgttccgggcttggactgccgcgctggtcaggcttggcggtttcggcctcattatccgtgggctccctgaaagtcctcgatggcgagtgggaaagcgctttgaaggaccccttagggaaacacaacaatcctctatgataacgccacctttgacatttcgcaacgccacacgacacacttcatcatccggccgaacgacacctcatgtacggccggatggcatgcccatatcgcaccctcagcgcccctgcatgaccttggcgagcgagagcagacgcgtgttggagaacagctcctccagcggcacgacattgcccttgccgtcggccagcgggatgcgccagttcggatattcgttgttggtgccgggctggttctgggcgcggcgctctcccacaccgtccgcgatggacgccgcgagcagcttgcacggggagccgcgcaggccgcggtacagcgcctcgacgatctcctgctcgtgggctttctcatccttcagcaggtcggggtcgagatagccgttgacgatcagcatgaccatcatggccttgtgctcggcgcgcgcgttctgctcgaagtcctcgaccgatccttcgatcagtcccaggcgctcgcgcagttcgacgtgctcgtacgcgagatatccggctgcgggcggcaggtcgtgcgtgttcaccgaagcgagcgagaacccgcgccaatccttcggggcgcggaacttgccgtccatctgctcgaaccattcgacggcgcaacccagcacctgatgcgcggacagcgacgtcgagacgtggtcaggcacgacgcccagatcctcgccgacgaccacgccgtgggcgcgcaacgcctcaagtgccaggatgccgagcatgatctcggaatcgtactgcacataggcgccgtccttgggcgtgtgcccggaggggatccaccacaggcggaacaggccgaggatgtggtcgatgcgcaccgcgcctgcatgggcgaacatgccctgcaccatgtgacgatacgtgaggtagccggtgttctccagctcgatcgggttgagtggcggctggctccagtcctgcccctgctggttgaagtaatccggcggcgcaccgaccgtggcgcccttggcgaaacactccgggttccaccacacgtcggagccggacggatgcacgccgaccgccatgtcggccatgaggccgatctgcatgccggcgtccttcgcggcctgctgagcggctcccagctgttcgtcggcgatccattccaaccagcggtagaagtccaatgtgtcggggaactgtcgacgcagcccctgcacctcgtcgctgttcttgtcgaggcgcttctcccagctgtcggcttcgccggtcggcgcgccccacttgtcgtagcacaggcaccacgtggcgtaggcctcaagcccttcggcggacgtgctcttgtagtcgtcgaacgccttctgacgctcctcgctgcgcccggccttaaaaatcagccacagggcgtgcatcttcacgcgccacatcgaatcacggtcgataatctgcgcatccccgttcagcggttcggcctgcgcgtgcagctcgccgatctgcgatttcagttcatcgccgaggccggcatattcctcgatcgcctcgggacgaatgtacgtgaagttgatgaagcggcgggaaatcggcaggtacggcgacggggtgagcggcgctaccggctcgcacgcgtgcagcgggttgaccagcatgaaatcggcgccggtcttgctgtgcgaatcgaccatgagggtcttgaggtcctcgaaatcgcccacgccccaggatccggcggaccggatggaatacagctgggccatccagccccacagctggtcatgttccatggccggcagcatcggaatacgctcgggggcgctgatcagcgtggcgtcctgcgtgcggtcgcccacgctgacatgcagcgtatggtatcccatcggcagatccgcgggtagggtgatggatgccgtcgccacgaacttgccgtcgacctcgtacgcctgcgatccgtctccggctcccggctccagcgcaccctggtattcgtcgccgttttccagcgtgatggttgcggagggaatctgcatgataccggtgttgagcagcacacgatcttccttgccgacgacatgcaacacggtcggggcgacgagacgcccgtggcgctcgcgaaggatacggacaacggaatcatcgatggcgtcatcgtcatgggcgtccacgcccaacgcacccagcaacgccttcaggacatcatcatcgatctcgtgatagtcgtcgctcatgccgatgtagctcgtggccaatccaaccagacgcgccagatggatcagcggacgcgcgagacgctccgcactttctgtactctctgtcatattccttagtgtaagcccgcttttgcgcggcacgcttacgtataccgcgaattgcgccagattttacccgcgattatcgcctgatccgccggcggcggacgggtcggaacgaaacggggtcggtacgggggtggcaggagggagcgcagggagggtgtcgcgcaatgatgcgtcacgaggcgtccgaggtccggctcgccgcggctttcgccacttcgggcgaagggtcgtcgcgcaaccggtcgagcgtctcctgcgaagtgccggggttcaacgccaccgcgcgccgcaccatcgtcgcgagaatcgccggggcaccggattcctccgatactccgagccttgacagcacgtccagggtgtcggagtcaagatcagtgttctgcgctccctccagccgcatcttccatgatgtgcgcttgttgcgcagcgccgcgtcgcgcacctcggggacctcgtccttggtcaggcgccccaccagccagttcttgtcgtcctcgttggccgccacggccctgcgaacgtccggactcgggtccgtcgacagcttgaccaggatgttcgggaacggcatcgtctccgccagcatgatgcgatcttccaacggcgtgtgccggttgccggcgacggcctccagtagtgccgtcgcacgggagaacgccgcctgatcggaacggtccggcaacggacggcgcgcgaactcggacagttccgcgctatcggtggagtgccgcagccgctcatacgtggcggtcagaggctcgaagggcgtggagtcagtggcgctgtcgggctgagactgcgtgtcaggctgagactgcgctgcagtctgcgccatggcctcgcgcaccgtggcctcgtcatcatgtcgttgcatctcgctcatagtcatcaccatacccgaggggtcgccgaaccgaaccatatcttccgcaaagtattgcgttcctgctgacgggtgagctgagtaccacaaaaaccacccccagtcatactacgcatgacagcccccgccagcgggggcgattaggaggtggacatgctgcgcataacatcgcacctgtttagattgcgacgggacggcttatcagttcaccggattcgggcgtcaccgtcgcgctgaacgtctcacgcacgcgccggagaaattcccgctcacgctccaccggcaccaccgcgtccagtacgacacggtcactgtaccgctcattctccagcgcggccccgcaatccgaggcgagttgacggaacacgtcaaattgcgggtactgcagcgctgtcgtgtatctgcggcacgtctcgatggacgccagtctggccaccttgacgcccagcgaggcggcggacgaatacgcgcgaatcagcccgcccgaccccagcaggataccaccgaaataccgggtgaccgtcactgcgcagttcatcagatctccctgccgcagcacgtcgagaatgggcttgccggcggtgccggatggttcgccatcatcgctcatcctctcccgcacgcgaccatcgccgtcgacgcatatcgcggcgtacgccacatgccgggccttggggtgcagctggcgaacggaatcgacgaacagcagcgcctcgtccaacgcatccacatggcacacatcggcgatgaactcggacttcttctccaccagtgcgtcatgcgccggccggtcggacgtgtcaagaacggttttcatcggtgatgttccactccttcacgacgttcttgtcgacgcccatcgaatagatgacgttccatatgcgctggcgcacctgcgcatcctgcgattcggaccagcatgtgccgttgggatggtcgctggagatcgggcaccactggtatgagccctgccgcatgttcgcggtcggcacccagtcgatgcggctgacgcgccatgccccggccacgcccttgcggccggcgaactggatgcgggcggtcacgccctgattgttgacgattctgctggcgggggcgctgaccgtcaccgtgttgccaagcccgtagatgatccacgtgccgttgtagttctcgatgggctgcgcgcaatggcatccggcgccgtagatcacgtcgaacgcgccggtgtccgcgagctcatgcgcctcggagacctgccacgaatcggcgtagtcgatgtattcctgcaccgaatgcatggccatggccaccacgtcggcgccctgttcacgggcggccttggccttggcgacggcacggtcgatgtcggactgatgctgggggtcgccggcttcgcgcaggcggtcgacctgccagtcatggtcggcggtcatgccgttgagcgacaccgtgccggtgaccaggccgagcttgccgccgcccgtgggcgagtcgatgaccagcggcttggtggagtcctcctcggtcttgtacgaaccggtctgcgcgatgcccttggacgcgagcgtatcccacaggcgggcgatgccgtcggcaccctgatcccatgaatggttggtggcgtgcgtgcaggcggtgtagccgaccgaggccgcggcatcggcgacctccggcggcacgttgaataccggatagccggtgtagggaccgccgcgtttggcgatcggcgtctcgaactcgcacacggcgatgtcggacgcctggatgtatggcttcatggtttcgaacagcggcgtgaaatcgaacgccgtgccgtcggtggcggcggtgttcgcaccggcgaaatgcttccacaggttcggatggaacagcaggtcgccgttgaccagcatggagatgcagtcggtgtccgggcagtcgggcgaattgccatggtgctccacaaccggttcgggtacggcctgcttgttgtcgagatcgacccgggtcaccgtcgcggccttgtccggtttcgcgacgggagcggcggcctgcatatgccgcacgaccagccatccgccgccgacgagcaccgccacgatgaccagcacgacgacgagcgccctgacgggcgaatgcgatgccgtcgtcctgtgatgcccttttccccggatgtgccccatcgtacgctccttgctcatctcgtcctgatggttctcagtctaacgcccgtcagctactgtccagtaagtggacacgacacgcgcgggcggatctcccatatgacacaagcacagacgtgcgacacgcgcgggaaaccggcatatgcaatcacattgcggcggcatctttcttactatgtgaacgatgacatcatcgtgtcacggtaaacgaagggggtagaatgactgcttggagacggacggacaatggcgtacctccgccccccctgcttcgctataagggacggtgcgccttgcccggatggccggtcgcgcggattatgcacgaccggctttctcatatcatgaccacacaaatcccagcgaacattcagcttttcgtggcttaccgattccctaccagtcacacagcatcgacccacgcaccggcggctccagcctgctgccataatacgggctgcaatagtcgttcttgacgtccctcgagaaagacccggaaaaagcaaaaagccccgggcaaacgtccggagcctagtcggcggagacagagggattcgaaccctcgagccgctaaacacgactaacaccttagcagggtgcccctatcggccactcaggcatgtctccatgttgcacattggcgcaacaacatggcatcttaccatcgtcccccggacttcagcaacacggtgtgccgcacgcggcgtcatacggggcctgacggcgggtcaacgcgccggattcgagtcgcccgtgaacgtgacgatccccgcgacgatcagcagcgcaacgccagcaatttcgcggcgccctgcactccgacaggccaggccacgcgcgggcggcaaagagattgcgacggccgctccccaaccggtacggcaaggcccgctccatcccagcccggcacggtacgataagggatatgagcaccgcacctagactggccgccgccaaacgcgattgggggcatgacgagaccggctgcacggtgctgcacatcgacatggacgccttctacgcctcgctggaagtggcacgtcatcccgaactcaaaggcaagccggtgatcatcggcaccgggacgcgctcggtggtgtcggcggcgagctatgaggcacggcgttacggcgtcaattcggcgatggcgagcgcccgtgcccgtcagctgtgcccggacggcgtgttcctgccggtggacatgcactactaccggatgatgtctcggcgcatcgtcgaagaggtgttcagccaggtcactgaccggttcgagcaggtttcggtggatgaggcgtatatggacgtgtcgggggcgctgctcgcctggcaacggccgacccggatcggcgcctggatacgacaggaggtcgcctcgcggttccatgtgacctgttcggtgggcgtcgccgcgaacaagctggtcgcgaaaatggcgtcgacgaatgcgaagcctgatggcatgctgctgattcccgtcgcccgtcacgccgagttcgtacagatgatgccgctgcggggcatacccggcatcgggccttcgctggagcggcggctggcggagtggggcgtgaagaccgtggccgacctggcgaagatgagcgagcagacgctggccacggccatcggctcgcagaccatggcccacggcctgtatatggccgcgcgtggcatggatgagcgtgcggtgacgccgtacactccggagaagtcgatcggctccgagagcacgttccccgaggacacgcgcgacatgcgacgggtatgcgacctgctgcgccggtgctgcgacgaagtggcgagctcgctacgcagacgcggtctggtggcgcggacggtgacggtgaaactgcggttcgccgatctgagctacaagtcgatgtcacacaccatggaacgcgccgaggacacggccgccgcgctgtatccgcaatccgtagagctactgtgccggatgctggggatcgagggtggcgtcgccgccatgcggagccccggcactcccctgccgcgagacatccggctcgccggcatgagcgcgagcggattggcgaggtcggctggttcgaccgtgcagccgacgttggatgacgtgctggaggagaccgaggcacagtccgccggaaccgtcacgcggtcggcgcggcagcgcgacgcggagcaggcgctggacgcgatacgccgcaaatacggcaagggcgcggcgtcgctgggattgtgagccggtgggtgagccgaccgacgtcagcgcgagagacgcctcgccgcgtcggcgacggcatcgtcactcgcggtggcggagaagcgcaggcattccggcgctccgtagaactccccggggctcgctatgatgccgagcgcggccagatcgtccatgtcgcgccagcagtcgcccgacttcgcccgcacccacacgtacagcgccccctgcggcatgcgggcgtcgtatccggcggaccgcagcgcgccgaccagcgtcttcagacggcggcgatagcgcgtccattgggttttcgccgcatcgaaatcacgcaatcccgcggccatcgcggactgcaccggaccggggatgatctgcccgatctgcttgcggtacgccgacatctcatgcaccaggccggcgtctcccgcgatgaacgcggtccggtatcccgccatgttcgactgcttgctgagcgagtacagcaccaggatccggtctgcggtaccatcgcagacggcggtgttcaacgcgcacggggacgtcgccaacgacaccggcgtcgacgcaccggccccggcaccgtccacgtggaaatcacgcgaattcgacgaccagcacatcagggcatagcactcgtcggacagcaccaccgcgccgatgcgacgcgccgccgcgacgatatcggacagccagccgccggacagcacgccgccggtgggattacacggcgaattgacccataccgccttcacacccggcacatggcaccatgagtcgacatccgagacgtcatcgaccttcagcacgctcgcaccggccagctgcgtgccgatctcgtacgtggggtacgagaccttcggctggaccacgacatcgccctcgccgaggtgcaacagcgaggccatcagcgcgacggcctccttggagccgaccgtgggcacaacgtcggcgttgatggattgcaggtccacgccgcgcacggcacggaaccattcgaagatggcgtcgcgcagatcaccggatccggccgtcaccggataaccgtgcgcgttcttcgcgtccgaggccacggcaagcgcctcacgcacggattgcggcaccgggtcgacgggagagcccaccgacaggtcgacgatgccgcccggcacctgtgccgcctttgtcttgtacggggcgatgcgagaccaatcgtatggcgatgaataagcgtgaaagcccatgctggtcctttcctcgacgtcctccggccggccgtggcgtgtcacccggcgaaggaaccgtgctctatgaaagcggccgccgcacaaggcgacggcctgcagaatgataccgggcggatcagtcctgattctgaggcggcaacgcggccacctgctcgggatcgtggccgatcgggccgtgtgcggaagcaccgccgaaatcaccgacctcggcgaagaaactcaccgcggcatccttgtaccaagcccactcgtcgggcaggtcatcctcgtagaagatggcttcggtcgggcacaccggctcgcatgcgccacaatcgacgcactcgttcggattgatgtacagggaacgcgaaccctcgtagatgcaatcgaccgggcactcgtccacacaagccttgtccttgacgtccacgcacggctgggcgataacgtatggcatgactcctccttggcttagcttgacttaccacagtacgcggcaacggggacgcacggtcacgctcccgccttgctccaccccgcaaaagtcccatctaacgcgcacgagatgggactttgggcggctaacgcaggtccatgccgacgacgaccggctcggggacgaggcggacgccgaacgccgcctccacgccgtcctgcacggcatgcgccagcgccgcgatgtcggaggcggccgcatccccgcggttggtcagtgccagcgtgtgcagcgtggacaggccggccggcgaggattcgtcgaccttgaaccccttatggaatcctgcatgatcgatcagccaggcggcggaggtcttcacgcccgccgtgccatccggcagcgtcgcggggaaacgcggggcgtcctgcggcagcctatcggccgcatcggcgggaagcaccggattcatgaagaagctgccgcagctgtgccggtcgggatcgcgcacgacgggcgtgtccgcgcctgcggccagctggcgacgctgcgcttcgagcgcgatgcgcacgttgacgtcgcgcttggtgccggccatcgccggctgaagataacgcgcggcatcctccagcatccccttggccgcacggaccttgagcacggcgttgcggatggccgcggtctccatgcggtcaccgacctcgactcccagcgccttggcgagctgtccgtaaccgaccgtgccggtagtgctgtgccgcagcgcgaatgtcaccgacagcaccacgtatcgcggcgtcgggaagaactcgccggccggcaccgccggagcctgatacatgctcgtcttgagagcgctcatacggtatccgaatcccatgtcggcagccgcgatgtccagcgtccgcttgtcccgacggtcccacgcctccacggattcgaccgcgcctgcgacttcctgtccgtacgcgccgatgttctgcaccaccgaggcgccgactgtgccggggatgccggacagaccttccacgccctccagcccgagctcgacggtgaacgcgacgaaatcatcccaattgcagccggcttcggcgttgacgtgcacgattcgctcgccgttctcgaccggcgcggcctcgtcgggcacggtgatctgccggcgggcgtcgcgcacgacgacgccattgaacggcccatcagcgaccagcagattggatccgccgccaatcacgcatagcggcagccctttggagtccgcgtcctccaccgcttcaatcaccccgacgcgcgaggtcggttcgatgaatcgggcgatatggccgccgacgccgatagtggtcagatctgcaaaactcgtcatgccctctagggtacacgcgcccgtcccgcgagcggcggccgtgcgacggccggggcgatgaaacgacaaaagcccgaccggtgaaggtcgggcttttacgacaaagacttgataaagctcagcgggtctcgcggtgcacagtctgcttgccgcaacgcgggcagaacttcttcagctcaagacggtcgggcgtattacgacggttcttcgtcgtgatgtagttacgctccttgcactcagtgcatgccagcgtgatgcccggacggatatcggcgcttttgcttgccatgtggttcacctctgtggtcgttgtttaccggtggcttaccggcctttgtagcgagaaagagactcgaactcttgaccttacgattatgagtcgtacgctctagccagctgagctatcccgccagagagccccgagtgagaattggactcacgacctcttccttaccaaggaagtgctctaccactgagctatcggggcgtggcggatagtggattcgaaccactgaagcacgaagcggctgatttacagtcagctccctttgaccgcttgggaaatccgccatggctgcttgtcgaggctgtggcctcaactggcaacttggctatctaaacacaagtcgccgacttttgcaactcgcgtgtcgcacacggcatgtcgcaagtatttccaaggtatcacggcatctcaccttcgatactcgcatcatgtttttctgcgcaatgacgccgggaacagccatctgaacatccgccagaccgcattgccgcgtcgtttcgcggcgacggtgcaccgggcgcacaacccgcgcaacggttccggcgacggcgcgacggacgtcggacgcgccggctgtcacatggtccgcgagttcggccagatacgcgccgaaatcggactccccttccggcgtcacggcttccagacattcggcgatgcgaccggcaataccgcgcttagtgtcgacaggcgaccatctcacgcccgcgtcccatgccgaatcgcacgcctcgcgccacgccgcacgccaagcccaccccatgccgttagtcgcgtccggcgatccggtctctccgaccgcctccatcaggccgaaccgcatccggcatcgacgctggcgcacactcgatgggcgagcaccgggaccaccaccgagcgcacgtcatccgccatcacgaaatcacgaccctgcatcagcgcccgcgcacgggtcatcgccgccacgttgaggctgcctcgcggcgacactccgaaccgcacgccctgcgcgtcacgggtcgccgcggacagcgtcattaccgcaagctcaatcacctcgcgggagcacgacagcacaccggcaagtgcgtcgatgatgtcgccgatgaccgccgccgacatggcgggagtgtcgatcgcgatgtcttcgtcagctccgccgttgctttcgatacccgttgcgcgtaccaccccagtcggccccgccgacagtccccgtcagcgggtgcggctattgtgcggcgtcccatacggcgcgggacagttcggtgatctggcttggggccacggctgaggagatgtcgctgctcatcaccgcgagcacatacggatgggtaccgaacacgatcgccacgtcgttctgaacggccgccagctcgccggtcttgttggcgaccttcacaccggacggcacgcccgcgggaatcttggtgcgccgcgtctggccgagcagcagctgcatcatgcgttcgctggcgtttttcgacaccagcgtcccggcgtacacctgagagaggaacgagccgcagtcgcgcgtcgaggtccagttctccaccgcgttgcccgaggccatgccggtcaatgtgcgcagctcctcgctggaggtgaagccgtatcgttgcgcggtcgcggtgacggtggcgatggcggctttgccgtcgccgttgccgatgcgcgacagcagcccgttcgcagcttcgttcgagctgacggtgatcatctgcttcagcagggcgtccacgttcgcgtcatcggtgatggtgtcatgctcgatgccgtcgaacacggccagcatgatgtagagcttgaccagtgacgccgccacgagtttctcgtcgttgactgtgacgtcgcggcctctttccagatcgatgtagggcgccgaccatgtgccgccgtactgcgcgagcttggtatcgagcacctgtttgacggcagcgacacgcgtctcactcgggtcgggttctttcggcgctgcgggcgcgggcacggccgtgacctcccgcgctgatcggcttgccgcaattcggacataccatcatgattgcctgcctcatcggaattcccttgtatcgtcttcccttccgcacagtctaccaaacgagtgcggccagacataggaaaaccccggcgcatatcatgcgatccggggttccgtgctgacggcgctgtcgtgcagcgttcactcagccaagaatggcgagcacgtcacgagaggagacgatcaggtagtcctcgccctcgtagtgcacttcggtgccaccgtacttggagtacagcaccttgtcgccgaccttgacgtccatggggatgcgctcgcccttgtcgtcacgacggccggggccgacggccaggacttcaccctgctgcggcttctccttggcgttgtccgggatgaacagaccggacgcggtctgggtctcggcagcggcctgcttgacgatgatcttgtcttccaacggtgtgagcttgatcgacactgtgggtcacctcgtattcttgaaatccaatcgtatggtcccgcgatggaatgccgccattcagaggctgacgatcacttcgggcatcatcccttcgcgctagcactcatcgtagcgcgattgttagcactctgccaactcgactgctaacgctctgagagaaaatcacacgcaatcacgacgagcggcgcgcaagaatcgcctcaaggccggttcccagcgagtcggaggacgcatccggggcatccacgcttgaccgcacctccgtctgatggaacgcgtcggtatcgttcaccgaggcgtcatccatgaccgcggcgacggtggcatccgcatccgactgccctgcatcgccgccgtccacgatggtgggctgctcggcaaccagtgcaggaacggccttcgcgacctgcttcgtcgatttgatctccaggctctccggcgcgggcgcatggcggtcgacgccattgcgcggctcgcccagcgagaacgaaatcagatcctgagacgcggccacttcgaaggcgtccaaggccgcggccgggtgcacccgatccagttccgtggtcatgtcgccgcccgagggggcgctcccctcctcgacgaccacttcggcatgggagtccgcgggctccacgacattcgtcgcggactcgtccgcggacggctgcgcgacggcatcctgccgcggctcaggctgcacggccgacgttacggccgcttccggctgttccgatgccgcatccacatcatgccggccgttttcggacgcagccatcgcatgggccttctgccgcgcctcacgggcggccaacgcgcgatcctgctcgatacgtgcgcggtgaagcgcctgacgaatctcccggcgttccatcacgtcggtcttcacttcggtctcggcagagggattcgcggtggcggttacctggtcatcggccgtatcagcgattgccttcgccgcagacttgtctggggacgtggactttgcctgagacggggactttgctcgcgggcgggcactcgccccggcccgtttcgccagacgttccctgcgccgcgcctcggccagcgcatgctcccagcgacgggcctgactggaggcccgcacgcccaacgccaacacgaccgccagcagcacgcccggaatcagcgcgaacagggcgctgaaaggcagaaccatcgacagcaccagcaccagcaccgtgatcagcagcagcgatagcgccaatatgcgccgacgacggaccgccgcacgccgaagctcgcgaatatgcgccactttcgccgtggtcggcgtcgtggtgctcgtttgcgcccgctgcataatagcccctttcggctgcggcgtatgctcgtcggagaatcgagtaccgctgtcggcatccaccagatgcaacgacgacgagtacctgtcctgacggtgctcggccacctttttcatgctgttgaccgtccgcctgggcagccagccaaccgcgataaccatcagaatcaccagcaccaccacggtgctcagcgactcataacccatgtccttaagaataggagactccccttacgattgcactgattccggcatggcgtgtcgagctatcagacgatggatgaacccgtcgccggcgtcctcggcgaacaggctgtaggtctcatgatcgcgccactgcccgttgacgaacatgtaccggggccgcacgccctcataatgacaccccactttacacgccaccctgcgggagcgctcgttttccggcagtaatgcgatttccatgcggtgcagccgagggccggtcggatcacagaacgcccagtcggcgagcagcgccaccgccatcggcgcgaagccatgccccgcgtaccgctgatcgacccaatacccgatcacaccggtgcgcatggatcccagatctatcgctcccagcgaaatctggccgacgatatgctcatgataatcgatggcgaacaccactccgcggccggtctgctcgttgtgacgcatctgctgcatccactggttgtaggtcatcggcgagccgtgcatgggatcgcctgactcccatggatgcaaccacgcatcgttgcgccaccgcacctcgttccactcctcttcgtcgtccgccgtgatcggccgcagctttatcgggcactgcggaatgccgatccaccgcggcacgcggatggatggcgctgccggctgccggaacacggcgcatatcgattgcaaaacggacacgcacccattgtgccatcgtcgcgtctccgacacggcgcaccgtccgccgatgacggacattcgtccatgatagaacgtaaccatgaacctttgccaacgtcggcagacgaccgatgccgatatgtcggacgatctgcgcaagagacagctgagacgggacgccatcgcgcggcgtaagaccgtgacgcggcaggaacgggacgcggccgcggcggcactggccgaacacattgtgccgttgctggacttggtcggcgtgcaggccggcacgtctggcgtcatgtccgcgccacacggccgcggacaccggccgccgaccgtggccgcctacgtgtcgatgggcagcgaaatccccatgcggccgctgctgtccctgctgctcgaccgcgggctgcgcgtccttgtgccgcgcttgggctccggtctggacgtgggatgggctctgctgcccgacatggcctcattgcatggcgtgacctgcgagggaaccggcatggcacaacggccggatgagccggatacgcagacgcttggcccggcggcccttggcgatgccgacctgatcatcgtgcccgcgctggccgtggatgcgcatggcgtccggcttgggcgcggcggcggctggtatgaccgcgcgctgacataccgacgcggaggcgtgccggtcgtcgccgtctgctggccgtgggaatgcatggcagacgacctgccccgccagtctcacgatatcccggtcgactgggtggtcacgccgcagggagcccgacgcctgtagttcgccatccacgcaagttcgcggagggaacaaaacgagacgtcgagcggcgcggtgtccgcgtgacgactaggatatgaacggacttgatgcgtatgccgggcatcgcatacgtgccggaatcatataatgagcttcgaccagggaggaaccgtgccaacctatcattaccgttgtaagaactgcggatacgatttcaccgagcagcagtcgttcgaggacgacccgatcaccgtgtgcccccagtgcgggcaagagcaggtgcgcaaggtgtattccgccgtgccgatcgagttcaaggggcacggcttctaccgcaccgacgggcgcggcggctccggcaaataagcagctgccattggcgcgttcgccgtcttccggcggccagtgctcggcccgcgcatgtgcgacacgcccaagatgtggataactgccgagccttcgaccacattttcgtcacggcttgcgcatcggaacaacgttcagtcaccatgcttgcatggtgactttttctatattggagaagctgaagcgccccacgttgcgccaacgtcggatgctgcggctcacacggcggctgatggcggcctgttgcacggccattgcagcattcgcgacactgcaatgcgtgacggcgagcatcgtcacgcaaccggtcgtggtggcggcacggctcatcccacgcggcgcgcgtatcggcgcggaggacgtggagatccggcagatgcccgtatcggatggttgggatacggcgctcgatgcggcgaatcaggcggcgggaggcatcgcgcagacggacatcgccgccgggcagccgctattcggcgccatagtttcgcggcggccggtggcggaacccggtcagacggtgatcgatgtacgggtcaccggcacggtggacggcatcgcggccggtgatgtcatggatctggtatccggcaccccttgcgacgcttcggctggtacgacttcatcgcgtgacgaatccgcaggcggccggtcatgcgttctcgcgcgatcggccacggcgatggatgccgcccatgacgatgcgatgaccggcggcacgctcatcacgttcgctttgactcccgacgaagccatatcaatcatcaacgcacaggaactcggtccgattatggccgtcactgcgcaatagctgcggttgctcagccgcagcagccacctccagtctcgctgttcgcgcgactggggtggtcaccacactcaacgtttgtcgttgaagatggcccagtggggtggcagttcgccgaggatgcgtttgtcgtcgtcggcctcgcgctgctgctcggtgcgcatatcgcccggttcgagtttcacgccgtctgcatcgaagcgctcggttccgtggaacacgacgcgtttgtgctcgcgccgcgtacgacgcgaggcactgtacggccttggctccgaggcatctgcggccacacgatccccgtcaccagtagtatcgccgctcatcgcacatccccgtagatctcgccgatgcgcgacacgatcgcatcgacctccttgtccgggttgacgaatgcgccgacactccacacgctcatcaccgaccagcccagcgacgcaaggtcctgcatcaggccgcgatgccgttcgcgcgtggactgcacgctcatgaactgcgcgtcgtcggtcagcacggccagcgcgaacggcttgtcgggcaacccgacgaccatcggaatgtgcaggccgcggtcgaacccgtagtcgacggcggcgttcagtccgcgggaccgcacgcgctccgccagatcattgaacagcacattgttcgaccgggtgatggtcaccggacgcaccacgtggtcgtccagctgctccacccaccgcagcatggcatgcagcagctgcggtccgggctggtgaagtcgctcatcgtccagatcagactcgtcgaacgccgaaacgatatcgagatggcggtcgcacagcgccagcgcatccagcagcatggcacgtccgccttcgccctccagcacgccgaactgctgcagcagacgcccatgcacggtcttcgcgtagcacaacgacagaatcacgtccgtcgactgggccccggcgatctccggcagcgcgacgatgcgcacgtggcgcaggaactgccccatggtcttgttcttcgacgccagcgatttcagttccgcaccgagtcgcgaacggaatgcgtcagtgagcgtgaccacggtcagcgtgtagccgaccggcaccacgttgaaactcgccgcgcgttcggtgatgatgcggacgacctcatcgatctcctgctggctgctctcgaccaatccggtggccatgaccggtgttccgttcgcctcgaccttgtggaaggccacccggccttgcgacggctcggtcgtgacgtcatagcgcacctcgccatacctctgggattccaggaacgcggcgagcctgggcgcgcgccgcacggggtgggagcggaccttcacgctcggcagcagctccatcagcgccttcacgctcggcgaggtcacagtggaccggtgggccagcacggccacctgcttcgcgcggcagacgatggtcagcaactggatggccggaatgtgcgcggccgcgtcgatgattgccacgtcggcgagggtcgtcggatcggtgagcgcggcaagcgtggccggggtcgccacgatgatgggtttggccgcggccaggatctcggggtggtcacggcgtatccggctgagcgggatgcgggtcttgccggccagcaccgtgtgcagctggttggattcctgcgtgcgggagaacagcatttcacacaggcggcgcatggattcctgcgcgaccatcggaccgaccgaacgcacgtgttcggtgtccacctgtgcgaaacgatccgcagcggactgcaacgccgacccatcctgattggagatgatcgcggacgcccgcacgatgttctcgaacaccgtggtccaccatgccagctgcagttcggcatccaccgattccaccggcacacggcgcgtgtgcaggtcctcgaccagttcggcgagcccggccgtctggaattcatgttcgagacggcagcgctccggcagtgtgtccagcgcgagatggtcgtcgaacagcgccttcagacgttcctcgacggcgacgaaatcctgcgattccagatcgccgccctgcacggtggtggacagtacggcgtccagcgccgtcaggtcgcgggccagctcctcctgcgtggcgatgatgtcgtcgagtttgttcggcaacaccggccacccgccgtgaggcacgaacatgcgccattgcgcagcctgcttggccacgacctgcagcgcatcgtgcaggttctcgacctgtgcgcccacgcgcagcaggctcttggcctccttgatatggcggcgacgctcccagaatccgatagtggtgccttcggccttgcgttcggccttggacttgctcgactcgatcatcgcgtcgatgtcgcgctcgaagatctccggctggaacacgtcgagcacgcggtgcaggttcttcagcacctgcacctgacggccccactcctgctcggtgttcggtatcgggaacccgcatgtctgcacggtggacgacacctgttcacgggtcaacggcagcaacttgcgcagcagatcgaccacacgctggtagacggtcacagcctcatcctcggacgtaatggaggccttgaaccaagcggtatcctccggtccgagcgtgaattcgccgagctcgccggcacgcctgagcttcgccgcccattcgtccagatgaccgccgatctcacgcgcggtctccttgcgcaaccgcactcgggtggcgggatgcgcgggcaacgtggcgatttcggcgaggttctgtatggtctggtacgcggacacgccccactgcttgtcggtgcagtgcaggtcacccagataccgggtgagacgggaacgcacgccgaccagctcatcggcgatctggtcgaaccgggagctggcgacgccgggctggaatccgaccgcggcgatcagctgatggtcgatgctgtcattgcagcgctcgtccgagacgtcgagcacttggccgctgagctcattggcgctgatggcctgacggaaacgacgcttctgatcggcgatgcacggcacgtacagtacgctgcggccgttcatcacgcagcgcgacgcgatggcggcggcgtaatcggcggtgtcacgcccgttgacgacatcgactccgagcgaatgcccggctgcgaccatatcggccgcgtaccgcacggcgttgtcgacatcgccgacttcgaactcgttgtgcggatcggcgtcgaatgggctgaacgcaggtgcgccggagtccttgagcgcttcggcggcctccttgctgcccgcgagcgcgtccagcaccgtgttgccggtcgccccctcggccagcgtatcgatgatgtgctggctttcggcaagaatcagcgagccgggcgacatgaagcagcccaggataatctgccgctcgatggtgaaatcggggaacaccttctccgcacgcttggtgatcgccgcgaacaccgcggacgtttcgggcgtgccgctctcgtagttggcgccgttgaacagctcccgctcgtcaagttcgacgtgctgctcgcgcatcaccgtcacgaacgcagggttgagccggacatgcccgacgaaccggatcaccgccacatcgccttcatcctgggcgctttgcacggataccggatacagcagcaccggcatggcaccgtcgtcccatgtggcgactcccacggtgagagacagttccgcgacgccgctgacgcgcagtttcgcggccttctcgtcaagcacccgctccagtcggcggttcgccgcacgcagcatgccgttgtcgcggaacagcagatccagcgacgcgcgacctcccgcgaacagctgggcgatgccggagggatgcgcatgggtcaaatcgagcttcgccccaagctggttgatgtcctccaatggggacggcaccaatccggcgcggtactgctcatgccattgacgcatgcgttccagcgattggggcgcctgttgcatgctttcgctcatgacccgactcacttccctaccgctttgcggtaactcttgtagccctcattgttctccagcgcggcgtcgatgtccgctttgccctgatcttccagccaattatagaggtcatcgtacagcaatggattcatggcaaggaacggcagcagctcttcgcaattcgcgatggcgaactgctcggtgtagtcttccgtggtcttcgcctggtcagaggtgtatccgttgacttcgattttcggttcggcggcggcaagcctgcctttcgacacgagttcgaacaccgatcccggctcgaatgcgggtcggaacgaaccggtcgagtccgcctcgtcgtcattcggctgcgcgaaccggcggtgctcttccggaatctccccgtgggcggtgtccgtatcggcttccacgacgccgtcgcctgccacggcaccggcggtgacttccacaccggccgcgttggctgcgacctcgttcaccgcctgacggatgtcatcgtgcgcctcctgatcggatgacgcctgctggaatcggtcgtcggacggctgtccgttcgccaactgatccgcctgctctgcgggcgcggtggactgcccggcctcttcgctgtcctcggcgagcgcgtcggcgaacaggtcgcggggcaacgccaccgccggcttagcatcggcaccggccacgttcaacggcatggaatcgggctcgctcggctcatcgttggtctgcgattgggccgcggtcactacagaatcagatacagcggaatcagccggtaccgtatccgcggcggactcggatgtcacggttccagaagtcacggtttcaggcgatgccgtatcggatgtcgcagtctcagtggatacggccgcgtccgcggcatcaacggcatccgcaggcgccgcattctcggaggactcggcggcttccggaaccttggtctcggcaccgctctcggcagcgtcggcctcagccggcgacacggtttcggccagcaccgcggcctcaacgggcatggcagcatccgacgaaacggcaagctccgaatccggctcagcggcgccggccgcggaatccgcctccaatccatccgctgtggtcgtcttctgcggcgggaacgtctgcgatgcggcggcattcagctcaccgacacgcttgcgcacggtggcagcgctgatcgcggcggtaggttccccggcacgcaggtcaagaatgtcatccaccgacatgtcggccacatcaggctcctgcttgacggtctccaaagcgtatccgaacaggtcgggcacgacgaacgtgtcgctcaccggctgctccacacgaatgaaatcgacggggacatcgccgaattgcaggcgcatcggtgaagtcggcagcaggaaatcgacgttcggcggcagacgcatgagatcgccattgccccgcaccacatatgacccgttggtcgagcccagatcgcgcacggtgccgccaccgttctgactcaccgcgaaggtcgcatggcgtttcgacatggaccgcgtgccgtccgctatctccaggcgttcggtgccgtcatcgggcaacggccgcaacggcttgcgcccgatttcgatgctgtctcccggcttcacggttttctgatcgatgccaccgattctcaccgtccactgctgtatcgtccgctgatcgccagtcacgtgccgcccttcctttcacgctcgttcgcatactatgtgccattgtgtcatgtcccgctgtgttttcagggattgatgaccgatgaattgacaacattatcgcattgatgccggtatttcggattgtagcgcacaccggtgcggaacgcccatgtcaggccgtgtcaggcgttcacagaagcggtctcggctccggtgcgcggaccgccgcatacgcgcagaccctgcggccgcatgtgcgacagcagggtctgtgcaaagctgcaatgtgcgggtttcactcccgcgatcattacttgagctcgacggtggcgccagcctcttccagctgagccttggccttctcggcgtcttccttcttggccttctccaggatggccttcggagcgccatcaaccatggccttggcgtcagccaggccagcgttggtgatggccttgacagccttgatgacctggatcttcttgtcgccgacagcggtcaggacgacgtcgaactcggtcttctcttcctcttcggcggcagcgccggcagccggagcggcaacggcgacggcggccggagcggcagcctcgacgtcgaacttctcttcgaaggccttgacgaactcggagagctcgacgagggtcatttcaccgaaagcttccagcagctcttcgttggtgtacttagccatgatggcttcctttcattctggcggcggccttcagcgattgccgtccgcctgatgtgtgttgttttccgattgtggttcatgcggcaagccgcatgagaatcaagctgccttttcctgcttctcgcgcagagcgtcgatcgtacgcacggccttggtaggcacagcgacgaacaggtacgcggccttggcggtcgtggccttgaggtcgcctgcgaacttggagagcagctgcggacgggacatcatgtccgccagcttggtagcaccctcgccgtcgtagacggtgccgtcggcataaccgcccgagataacgagagccttgttggtcttggcaaagtcacgcagcgtcttcgcagcctcaatgaagtcgcccttcacgaaggtgatggcggtcgggcccttgagcaggtcgtcaagaccctcaatgcccgcttccttggcggcgatgcgcgccagcgtgttcttagccacagtgtaggaagtatcgcggcctagcttttcgcgcagttcggaaacctgcggaacggtaagcccgcggtactcagtcaggtagacagcgtcggcgttacggaactgttccgtaagctgagcgactaccgcttccttttcgggcctcttcatggcgttccttcctagatcggccattgatcctgcgaagtcccgcgcaccctgccagggcaataaaaaagccctgcgcacaggcagagcaacatacaaccgtttccggcgagccgtattacgggcacatatttctcaacctgcgctggcttggcgaaccaaacttcgtgagtgcttgcacactccaaccaacggtctatggtttacaagtcatatagaatacggccgcgagcggacaccttcaacccgggcgtgtcgcgaccgtccgcccagcacgagcgccactccggtaatgcccgccgacagcatggctatgatggccacgacggcatcggagccgcgcagggcatcccgtttcccgttgccatcggacgaatcgccggcgttcccggcggcggtaccctgcgaggtaaggccgaattccacgccggctcttttcgtggcgccgttctccgtctcgtttgcgatgacccgctcccttccggtggagccgatgatctgcgccgaccggtgcatgacacctgcgatctgctcggcgaggaaccggtacccgtcgtcgttgaagtgaacgccgtcggcgtcatacagctgccgccggttcgcggtcgccgcgtacaggtcgatggtgttccaacgctcgtcacggatcagcgactcctgtacgggatgtaacctgttcacggagttgacggagacatatttggtaccgggggcgacccggtatgagtgcggtgaactcgcgaaatacacgaccggtcggctggcgagatcccggtacaccctcaccagctccttcgcctcggtcctgtacagtgtctcgttccagtaggcgtccttggaatcgttggtgccgagcatgatgatgacgatatcgggggcgaactccttgctctgccggaattcggccgaatcccaatatgaccagcccgtgccccgcagcagcgtgtcaccagcggcgccgaaattgcgcacgtcatagccactgccgaggatgcggccgagccacgccggatacgcggtgtcgcctttcttgccgccactggatttggagccgtccgtaaggctgtcgcccacgcatgcaatcttgatgggcgcggctgcgtgcgcttctccctcgcacggcaccataaccgccaataaggtcaacgtcagcacggcgagcgccgcggcgagcagacggaacggcgaattgcgatgaatcacacggttcctcatgtcgcagacctcgctatcccttcacggcgccaagcattatcaacgccacgctgccaataccataagtttctcacggcaatcgtggccatgagtgaagatttgccagcgaagacctatgcggctcgcgtcggtccggaatgttgaccaaacaggcggcattccatcgcgacacgcccggagtgctcagcaagatcggcatgccgaatttcatgaaacgccgccatggagccgattcccgcaaacgcacgcgacgattgtgctacgcactccgggcgtgtcgtggtcggaggctgcaaataatcggcccgccggacgaaaaatctccgtccgacgggccgaccgccccatggcgtctcagcgcttggccagtgcgagcgccgcaccggccatgagcgtcagggccgcggcggcgatcggaacgatgccggcaccggtggcgctcagcccgcccttcttgccggtatcgggcttggtctcgtcgcccttgcccggcttgccaccatcacccgcgccgggcttgtcaccgtcatccttggccttcagcccgtcgacggccgcattcagacttgcgagcgcagcgtcaatctcggcctgcgtcgcatcaggatcggcagcgaccttctcggctgcagcaagcgcatcacgcaccgcccggacggactcatccgtatacccacccagatccttggccttgacctgcgcgatcacggcgttcagctcgtccttgctcaccttgccgggctcgggatccggcgtctcggcgggcttcaacccgtcgatggccgcatcgatggcggcggcgagcgcgtcaacctgcgcctgttgcagggattcgtcggcgtctccggccttcgcggccttcactgcggcatccatcttcgcccacgagtcagccgtgtagtcggcggcattcagcgcctctgcccgcttgattgccgccttcagtccgctgcggtcgatgagaccgttcgcgtattcgacctcgccgagcttgaacttcgcctgcttgatatagcagcggtcggtggtgacgccgccgggccagttctgcgagaattccttgtcccagtgaccgtacgtgtccatgatgaacgtaccgtcgtcgagcaccgctacgcccgcgtagccggtgtcgcccgacttcgcgttgttcgcccagtcctcggccagcaggatgcggtattcgccgtcctcctggttaatgagctggtcgtaggtgccgacccaggccacccagtcgccggcgttccagtcgctgccgccgtcgaaccggttgttgccgttgagatcgtagttgatctcgcggaacgtgaccagcagacggccggaaatcggatcgtaggcaatcttgtgccgttcgcccgccagcgagccgggcagatccatcggcttgctccacgtctcgccctcatcatcggagtagatcagtgtcgccgggttgttgtgcgactggctgcgcgccagaccgatgatccgcttgccgtcgggagaacggaacatgccgatctcgcacatctggtatgcgctttcgatgctgcgccattgcgcaagatacggctccgattcgctccactgctcgtcgccgttctcgtcgaaagtgaggtacgtcctgaaattgacgtacgcgtagttgtggtagacgcccatccatttctggatgtcgttgccgtcggagtccttgagctgcacgaggctcgccatggcgacgatggcgtcgttgttggcgttgtcgtacgtgcggttggactgccagtgccggtattcggtccaggtctcaccgttgtcgtcggaatacgatgtgttccatccgtacctgttgccggcggagtcggtaccccagcccgggcaggcggtgatcatcatgatgcgttcggtgccgtcggccaggttgagcacgtacagggtcggcgtctcctgcgaaccggcccacgacgcggggatgtcggtcttgcgcgtccaggtggcgccgtcgtcgtcgctgatcttcatgatcaacggtcccttgccgtgcccttgcgggaacgaggtgatcagacggccgctcttcgtgcggatcatgtcgggctggccgaagtactggttggacgtgtcgagtgacttgtgcacgtccgtgaccttcgtctggtcgagcttgtactgcggcagcgtgttcttgatggtgagttcgcgtctcacgttgacggtcaccatgtcggtgaatccacctccccggacggtaatgaccgccgttccgcgggacactccggtaacggtgccggaggcgtcgaccttggcgatggtcgggtcgctcgactcgaacgtgactgtaccatcgccgtcgccgccctgcaggttggcgacgatggtgtacgtcccgccgatgtacatatcggtctcatgctcggcgaggttgagaccgggcagcagcatgccggccgcgatctcggtgtcggagagcacgcgcttgtagatcttcacctcgtcgatcaggccagtgaagccggggccgccgatcacgtcgatcggggcgacgacatcgtgcatcttcgtccacgtgttcgtcgcgccgatcttcgtgccgttgacgtacatggtcagtccggctgccttgtcctgagtccacgcgatgtaataccacgtgcccggctggaagtcgtaccggaaggtgagcacgtcgccgctggcggtgccgacacggaagccggattcgcggtctgcgtccatcttaaggtcggccgagtacttgccgtccgcgctcgtcatcacggccgagcggccggtgagttcggcgtcggaacgcacccagtagccgatcgtccacggatccgtcttcgcgatgtcgttgccgccggccagggtcacgcctttgccgtccgtgaccttgagcgccttgccggacttgccgtcaatgtattgcgccgtggcgtcggcggtgccgttgcgggtgccccaggagtcgttggcgttcgagttgtcgaacgagtagtagtgcagcccctgcgccacgacctgtggcgtcacggtgagggtgatgctcgccgatttcgtcgggtcggccttggacgtggcggtgatcgtggtggagcccacgccggcggcggtcaccacgcccttggcggataccgtggcgacgccggtcttggacgagcgccatgtcacggacgcgttcagcaggttcgccggcttgagtgtcgcggtcagctgcttcgccgtgcccagcatgatctcctggtcgccgccgtcgatggcaacggattccaccgtgctcgtgccttgcgccttgagggagatgtacttgtcggtgagcgtgtcgaggtcgcccttgaatccgctcatctcgttggcaagctgtgtgacctgcgcgtcggtcagatacgagtgcgaggtcgtcaccgtcgttctgatcttcgcgtacatcgcgtcggcatcggcctgcaacgaggggatctcggtgaccatgagcctgatcttgttcacgtcgcgcacgccctcggcgatgcgctccaggcgcacggacgacttggacaccttgtctccgctcttctcgctcggataaatcaggaacgggtcgccgggctcgaaggcgttgtgcgtggcgtcgttgagcgggtcggccacccatgcgtcgtacgcccagcgcaggaagccgctggtctgctcgcccgcgttgaccaccgaccagtagctttcgaccggggcggacagcgagaagttgccgggctcatgctcggtgcaggagtacagcgtggtgcgaaggccctttgcctcacgcgcctcgatcagccgggtgaagtcggtgggatgggccgccgccgcggtgtcgccgacgttcaggtcggtgacgcgcagcgccaggtcgaacttgttgacgaagccgtccatcgcgccggcggtcttcaacggcacgtcgtggatattccgtatcgagtcgatcaggtcgaacgcgtcggcgctgaagccgcgctcgtcgatgccgatgtacgactcgtcgaaccagcccttgtccatcagatgctcgatgagcttgcgcaggaagtcggtccacacgctcctccagcgctcggatccgaccgtgtatctctcggacttcatcgtcccgttctcccagtacgtgaagttgccgtgccagggcgcgatgctgtatatcacgatcttgtcgccgatgccgagtcccttgttgaacgtcacccacttgtcgaagtcggtgaagtcgtaggtgaacccgcccccgctcttggtccacttcaccatcgacgggtagtggatggcattggcgctgtaggtctggccggaccatgcgtcctcgttgatggtggttgtgatggcgtggccgccgatggacttgtacagttccatgcttgatctgaggatctgcaggtgctcgtccgagaacggggtgacgccgtagtattccgcggaggaatacgggtactgccacagttccacgtcgaagttcttctcatactctgccggatcgggcagcgtagcggccttcacctcgatggtgtaggtgaatgtgagcggcgtttccatcccgtctgcggtagcggtcagcgtggtggtgtaggtgccggccttggcgtccttcggtatggcaaacgatacccagatgttctgcacctgattggccttcaccgtgatcgggccgctttggtagaggatgtcgttgctttcggagcggttggtctcggtggcggcgggcacctcgcggttcgggtctccgtagccgagatagctgccgttgtatgccttggtggacttgatgaacgtggccgtgacgttgcttttggcgatgacgtcgccgccctgcgacgtcaggtcgcttgcggtgaccgtcaggttcgagacggtggtgccgaccgcggcgagcgagatctcgctgttgaccttgtcgttcttccatgctttcagcgcccggttgttcgtcgtgagggccttcacctcgtcgaaccgcttctgcgtgtattgcgtatcggggtccacgatgccgccggtcaggttcggtgccatcctggcgacggtgacgtcgacggtcttgctgatgccggccgcagtcgaggccacggtgatggcggtggctcccggcgcgaccgcggtgaccgtgccatctgcgccgactgtggcgacactcgtgtcgccgctcgtgtaggtcatgtcatcgatggtcgcgtaatcgggcgccaccgtatacgagatccgcttgctgtcgccaacgcccagcgtcatcgaggtcgtgtcgagtgtgacgccggtgaccacgtacggctgatgggtcacgacgaccttggcgcagtcgatcagcgcgttcgtggaattcgtgtcccgctcgcctgtggccaccgccttgaacacgtgctcgccttcgtcaagcccggtgaacgacgcgattttcgtctcgttgatgttggaggcgttgtacaggctgtacgtgcctttttccgctccgtcaatatagtatttcaccttgcccatgggcctgttcttgcctgcatagacgtcgattgcgctgccgaagaatcggaccgtataccagatgtcctccgccgggaggctgtcggatggcgccttggaccacgtatgcacgtcgttgcccggatcccaggcgttgtcggcgaacgtgaagtagttgccgtcgccggtgatcttggtgtgcgggatggtggtggtctgcacgggctcgacggcctgcgcccgcatccccgcgaaatgggggcccatgaccgtcgccagcatcatggataccgtggcgatcacggcggcggcaggtctccatggagagccacgaccgcgcagccacatagatattcttcggttcatttatggacatcctttctttcacctttgaaaatcggccaccctattgtgtcccagcctttatctttgccagctgtttctgattgtccagtatgccaatcgcgaccttgcgctcagcatccactcagtctatgtgttatgaaagacaacggcctcgatcttatcaggacacaagcttggcgagatcgttgccgtattcgccgagcctcggcaggtcgaccttgcgcccgttgaacggctcctgctgccatgagctgtaggagcctgtcaccgtggcatccttaggctgtcgagcagctggccgctgatgcagatctcgcaggccacgatctgatcatcgtctgcggacggatcgccgcccaccgtcaacaccatcgtcgcgacgggtggtatagggcagtccgttctgtcccttacatccatcgtattgccgagagagcaaacacacaagacggcacaatacgaatccggcccccgctggaaaaccaacgggggccgggattcaaggcagggcagatgccattacagcactgccagcaggatgaagttgaggatgaagagcagcgagacaatccagatgatcgggtgaacgctcttggcttccttcttgcaggtcttgacgatgcagtaggtgatgaagccggcggcgatgccgtagctgatcgagtacgcgagcgccatgaacacggcggcgaagaacgccggaatcgcctcggagatgtcgctccactcgatctccttgaggctggaggccatcatgcagccgacgatgaccagcacgccggccgtcgctgcggacggcaccgcggagatcaccggggacaggaagatcgacagcgcaaagcagatggacacgaccacggaggtcaggccggtgcggccgcccgccgcgatgcccgcggaagactcgacgtaggtggtggtgttcgaggtgccgcagatcgcgccgatggaggtggcgatcgagtcggcgaacagggcgcgatccagcttggaggagaagcccttgccgtcctccatgtgcttcatgtcgtcatcggagaagatgccggtgcggcggccggtgccgatgaacgtgccgagcgtgtcgaacgtgtcggacatcgagaacgcgaagatcgtgaccagcacgagcggcagtttggatacgtcggagaacagcgccgggaagccatcggcgctgaagatcacgccgaaggtctgcggcagctgggcgaacgtgtcggagatggacacggagttggacatgctggtcaggcccatcgggatgccgatgatcgcggtgatgacgatggtcagcagcatgccgcccttgagcttgagcacggtgaacacgatggcgaacagcaggccgatcaggaacagccacagggtcggggtgttcagcgtggccagaccaggcgtggcgccggtggccaggcccttgccggcggccttggtgtccttcggggtgaaggtgacgaggttgacgttgagcatgccgacgtaggcgacgaatatgccgatgccgccaccgatggcgttctgcagcatgggcgggatcgcctcgatgatcatcttgcggatcttggtgacggtgatgatgatgttgatgaggccgcacaggaacaccatgcacagcgtctcctgccacgtgaacttcagaccgaagcacaccgtgtaggtgaagaacgcgttgagacccatgccggccgcctgcgcgtacggcacattggcgaacaggcccatgacgagcgtgccgatgatggccgcgatgatcgttgccaggaacacgccgccccacggcatgccggtctggtgcaggatctgcggattgacgacgatgatgtagctcatcgcgaagaacgtggtgaggccggccacgatctccgtggacacggtcgtgccgttctccttcaaatggaagaacttctccatactttctctgcttccttgaatgtgcgaggccatccggcctcggcgagacaaactgctattcgcccggtttcccgaacacgcccaccataacatcttcataagtcatggatgttatggtgccggacggcctgtggatatatgtggataacccgttctccatccacatatccacagaaatcccgccgtctgtggcgcgcgggcccccgacccgctagcgttgcgcccatgaacgattacgaaccgataccgggcgagccgacagccaccatgttccagtcattggaacagattaggcggcagactctgcaacgctgcaccgccacggtagggcagtccgaccgccagctgctcttcggcatgaccaccgctctggaactgcaaggcgtgccggtgccctcccactgcaatctcgacacggccgcgctgcatgtcacggtgcagacgcgatccggcaggcctcatattcgaccgttgaaatccgtcccggtcattgtccacatctggagccattgcactccgcaatcactcatccacatatcgaatggcgtgcacgcattgcacgtgtttcatgtgtgggcgcagctgtccccatatctttcgacagaggatcttgttgtgctcggagattccattctcgcgatgctggtgcgcaatggcgcgccggacgcggacaaattgtatctggagttgcagcgtttcataaaagagatgccgccgttccgaggaaaaagcatttgcaggcaagccatgacactggtacgccccaatatacggtctcccgccgaaagctcgctacggctgggcgttcaacgccacggaataccggatggacgatgcaatgtcgtggttcctggaatcacctttcgttcaggagcagccatttcgctggacatcgcatgggtcgagttcaaggtcggagtggaatatgacggcgatcatcatcgaacggataaggtccagtggcgccgagacaacgaaaaaagggaacggttgcgggcccacggctggatattaatcatcgtgaccgctcaaaatctgattgacgagatgtcgattgcggaactggccctgcgtatagcaagacgactcgccgagcgcggagcttcgaggtcatcgcaatcagcctagagggactggcaaggaagcacgggtatcggtatgaccgaagacgataggcgtcgaatcatgctatgaccgggaacaacgcgaacgttctcgggtggagcggagcgtgacaatcaagaatgtcgttgtacaacatctgcaaaatcgcacaacacggcagttgtccagcatcgccgtcgcttcttctattccggagctccccctcacaaacgcgaagaccccgcgcggaggcggggtcttgtggcgatggacgcgcgggcggatgcaacgcatgcgatccgccagcgcgccgccgatcagccgaaacgaccggagatgtagcgctcggcttcggcgttctgggggttgttgaacatcgtggtggtgtccgcgaagtactccaggtggccgggctcgccgacggccttcaggttgaagaaggcggtgtaatcggcgatacgggcggcctgctgcatgttgtgggtcacgatcacgatcgtgtagtcgcccttgagctcgttgatcaggtcctcgacggccaacgtcgagatcgggtcgagcgcggagcacggctcgtccatcagcagcacctgcgggtgcacggccacggcgcgggcgatacacagacgctgctgctgaccgccggacaggccgatgcccgggttgtcgagacggtccttgacctcttcccacaggttggcgcccttgagcgcccactcgaccaggtcgtcggcgtcggacttggagatgcggcggttgttcaggcgcacgccggcgagcacgttctcacgaatcgtcatcgtggggaacgggttcgggcgctggaacaccatgccgacatcgcggcgcacggcgacggggtccacgtccttggcatacaggttcttgccttcgagctcgacctcacccttgacgtgggcgccggggatgatctcgtgcatgcggtcgagggtgcgcagcaccgtggacttgccgcagccggacggcccgatgaacgcggtgaccttgttgggttcgatgttgatgttgacatcctccacggccaggaagtcgccgtagtagatgttcagatgtttgacgtcaatgcgttgtcccatatgaattcctttattgatgtatatacagtgtacggcggcttaccgttcggacttcacggcgaagacgcgagccacgacacggccgatgaggttgaggatcagcacgatgatgatcagcaccagggcggcggcccaggagcgttccatcgggatcgtggtgacgcaggaggagccggcgttgggcgggcagttggcacgcagcttgctgtattcctggtagacgaacacgggaagcgtggtcatctcgccgctgaacaggttcacgttggtgaacgtcgcgtagcctgcggtcatcagcagcggcgcggtctcgccgatcactcgcgcgatggccaggatgacgccggagacgatgccgggcagggcggtgcgcagcacgatcttgcagatggtgcgctgcttggaaacgcccagcgcgtacgaggcctcacgcaggtcgccgggcacgaccttcagcatctcctcactggtcttgacgacggtcgggatcatcagcagcgaaagcgcgacggagccttcgaagccgctgatggtgccggggccgccgatgagcgagaacatcgagtaggcgaacagaccggcgacgatggacgggatgccgctcatcacgtcgaccagcaggccgatggacttggcgagcttgttgccgcgggccgcgtactcgatcaggtagaccgcgcacatcagaccgaccggcacggagatgaccatggcacccagggtgatctccaacgtaccgatgatggcgtgcagcacgccgccgtatccgccggagggcgtctggctgccgccgacgacgccggacatgttgtacgaaaggaagttgaggttcagtcgcttgatgccgttggcgatggtcgtccacagcacggagatcagcgggatgcacgcgatgatgaaggcgaggcagatcaggcccttcatgaagacgtccttgcgcttgcgggacgcggcgaaagaacggctggtcttgaaccggtcgaagtcgatgtcgggcagttgcttgtcgttgcgcgcggcgggcgtcttcttcacggcgttcgcgtcgacgctgatggtgctctttacagttgcttcactcatcatgcgctcgctttctcggtgatcttacgggcgacgaagttcacgaggaacgtgataacgaacagcacgaggccggtgccgatcagcacgggcacgccgatgttcgggtcggcttccgggtattgcgccgcgatgttcgccgcgatggtctggttctgggatgcccgcagcagcttgatcgagtacgttaggccgggggaaagaatcatgaggacggccatggtctcgccgagtgcgcggcccaggccgagcatggatgcggagacgatgccggacttgccgaacggcagcacggccagcttgatcatctcccacttggtggcgcccaggccgatggccgcctcctcctgcagacgcggggtctgcatgaagatgtcgcgcgacaccgaggtgatgatcggcaggatcatgacggccagcacgacggcgaccgtggcgacggttcgcgaggggctgtcggcgaccgacgggtcattgagcgatccatcgaagatgtaggtccacctcaggtacttcgcgaaccagttccacaccggctggatggccggcaccagaatcaggccgccccacaggccgtagatgacggacgggatggcggcgagcaggtcgaccacgtagctcagcgcggtcgccagcttcttgggtgcgtaatgcgagatgaacagggcgatgccgatcgagatgaaaaacgcgatgatcagcgacagcgcggagacaagcaccgtgccgaacaccagcgggcccacgtactgccagaagttgtgcgcgcggttgccggtgaatgattcgatggtggcggtgttcgcggcctgatcgcctccgatcagcggccacgcctgaaacagcaggaacaggaacaccgccgcaagcgcgacgagaatgagaatgccggcagcataggcgatcgtcttgaacacgacatcgccggtcttgcctgtactggccggactgtctgccgctttgtcttgcgaactcacaggttctccttcgtatgcattttcaatggtggcttcacggccgtgtacaaccgacagaagccgcaggcacctttcattgtgtcaggtgttctgcggcatccgccatacggcgtgtcagctcacgctgatcacttggtcttgatggcctcgatggacttggtgaccttctcgacgatgttgctcggcagcggggcggagccggcagcggaggaggcggtcttctggccttcgtcgctggtcacgtaggtgagccagctcttgacgaacttggcggtgttggcgtccttgtaggcggggcaggcgatgtcgtaggagaccagcacgatcgggtaggcgcccttggctttggtggcgtggttgatcttcacgaccacgcggttgtcgcccttggcggatgtgtcgatctcggaatcctcgatgaccttggaaccggcgtcagcggagatctcgttgtagttctcgccgaccttgatggccgcggtgcccaggtcgccgacctgggagaagtcggcgtagccgatggtgccgtcggcctgcttgacggcggtgacgacgcccgaggtgcccttggcgctctgctggccggggatgtcaggccagttctcggagagctcatgggtccaggagtcgggggcctggtccttgaagtagctcacgaagttctgcgtggtgccggacttgtcggagcggtgcacgacggtgatctgggtgtcgggcaaggtcaggtccttgttctggttggcgatggccggatcgttccacttgacgatcttgccgtcgaagatcttggcggcggtgtcggcatcgaggttgatgtgcttgccggcgtcggaaacgcccttcaagttgaagatgatggcgatcggggagatgtagaccggcacgtcgaacgcggtggtgccgttggcgcacgccttgtcggaggactgggtgacctcgtcatcggagagggccttgtcggagccggcccacgcggtggcgccgctcaggaaggtggtgacgcccgcgccggaaccggtcgggttgtaggtgacgttcgcgccggagttcgccgccatgtaggcggagatccaggcttcctcggccgcctgctgggaggtggcaccagcgccggagaagctgccggtaatcttctcggtcgaggtggaaccggagttgttgccggcggacgaagtgttgtcgccacaggcggcgagcgacgccagcatcacgatgccggaaaccgccgcgatggaacgaacgaagagattcttacgcattgtttctttcctcttatcaactgtcatagcggctcgtgtcatacgattcagagccgattccttttcatgacagttactagcctatgggctgttcgaggggtcggaagacaaaatcggtaaacagaagatgaatagttgccgaccttgccacgtagttggaatgcgcggtttgcgggatatggttcggcccgcctgcaccgggtggttcaggcgggccgagggcgctttataccgggtgtgggccggtcactgctgcgggctgtcgatcttgtagccgaggccgcgcacggtggtcaggtactggggatgggccggatcctcctcgatcttggagcgtacgcgcttgacgtgcacgtcgagggtcttcgtgtcgccgacgtaatcggagccccagatgcggtcgatgagctggtgtcgggtcatcacgcgccccttgttctgcatgaggtattcgagcagttcgaattccttgagcgggaagaacacgctttcgccgcgcacggtgacctgatgctggccgacctgcatggagatgtcgccgcacaccagcgggatgtcgtcgtcgaccgcaccgctggcctcgaccgcgccctggttgcgccgcaggaccgcgcggatgcgcgcgagcagctcgcggaacgagtagggcttggtcacgtaatcgtccgcgccgatctccagaccgacgactttgtcgatctcggcgcttttggcggtgagcatgatgatcggcacgcggctctgctcgcggatgcgccggcacagggccgtgccgtcgatgcccggcagcatcaggtcgagcagcaccaggtcgatgccgcccttggtgaacagctccaggccctcctcaccgctggctgcggcggagacgtcgtagccctcgcgcgtcagctggtacaccaggggctcacgatatgattcctcgtcttccacgatgagaatgcgtgtcatgtttacctttcacacatactgtgttcaatgtccgtaccgtcaccatcgtagcgtgttccggcaccgcccgcattcggctccgaagactacgttgctttccgcgggtttcacgatgggtggccgacgcgccggggagaccgtggcggcgggtctactcctgcgtcgcggcgtcgccgcctcccggcgcgccgacggtctcgccgggcgcttcgccgtcatccgcccgctcgccgtcatcgtcatccggttcgggggcgaccggcagctcgatggtgaacgtggagccttcgccctcgcgcgaccatacggagatcgtaccgccgcactcctgcacgcaatgcttggtgatggccaggccaagccccgagccgcccgtggcccgcgaccgcgccggatcgacccggtagaaccgttcgaatacgcggtccagcgacgccgaggggatgccgatgccctggtcgatcacgcgaatcgtcatggagctcgggtccttgcacagcgagacgctcacgctgaccgtcgtgtattcgggcgagtagcggatggcgttttcgacgaggttcttcacggccatggtgagggtctcccggtcgaccatgatggcgatgtcgcgctgcgcctcgtcgtccgcggcggcgtcagcgtcgaccggcgcctgctcgccgcgcagcgacagccgtatggcgatgtgcttcgcaccggcctgcaccaagttctcgccgacggccgcgcgcaccaccgacatggcggatatgcgctgcgccttgagcatcgccggcgcgtcctgcgcgcgctgcagttcgatcaggtgggtcaccagttcggtcagccgcgcggattccttggtgatgcggccggcgaaataccgcacggcgccagggtcatccgccgcgtcggagacggtttcggcgagcagcgagatcgcgcctgcgggggtcttcagctcgtgggagacgttggtgacgaagtcgcggcgcatccgctcgaaccgacgctgctcggtcacgtcgttgatgaacaccgcgtacagaccgtcgcagatatggccgacgcgtacgcgcaggtagctgtcggagggcgcggagctgccggcggtgacacctcgtccggaaatcgcgctcgacatgcgggtcaggtcgagcgagacgcacatctcgcgttcccgcacgcccccgttctccaccacgacgtgcaggatgtcgaggatctcgtccttgacgatccagccgttctcgatgacatcgacgttcaccgagcttttgctggagcaccgcacggaaccgttgccgtcgcagacgatcacctcggacggcatgacgtcgatgagcccctgttccgcctcgcgcaccggcacgtcggtgccgaacagcgagccggaatcgctcccctgtcccgccagcgtgtcgcgttcgccggactcgcgccccaacgcgtacgacctcgatacggcaatcaccaacacgataatcgtcaccagcaccgccaacgccacatgcacccatgtcatcggacccgtcccgcctttcctcggccctgcaccgctctcatccacccgcaccgatgatgcggatgcggatggtttcagcgtaacggctccgcacgtcccgccgccagcgcgactacgtaagtttgccagttgttcaacttgccgtgtccttccgcggcgcagcccgtcgaagcgagccgcgcccggcgtcacatgcgccgcaggatgtcgagcacgatgcgggccgcggtatccgcgtattcggagatatcgaagcccttgaactcctcgtagtcggtgtcggcgttgtcgctcagcgcgcggatcaccaacgcgggtacttcgtttcgggcggcgacgtgcgccacggatgcgccttccatctcgacggcgtcggcgccggtgtcgtggatgaccttggcgatctgcgccggcgtatcgacgaagtagttgccggacgcgatgatgccgatgatgtgcgtgacgcccatggccgagagcgcctggtcggcgagggacagcagacggtcgtcggagtggaattcctcgacgggctgctgctcggtgccgggcttccattggccgacgagtcgcatgtcggtgtcgaggtagcgcagtgtgccgccgagcaccacgtcgttgatgtgcaggttccggttgaggttgccggcgatgccggagaagatcaccgcgtcgggatggtatgcgtcgatcaggtgctgggtggtggcggcggcgttgaccagtcccatgccgccgacggtcgcgacggcggtgacggtgcctccgtcgttggttcccagcgtgccgcgcgtcacatcgaggccagcttggcggtcgtgggtgacgtcgttcagtgatgcggcgatgagtgcgacttcgtcgtccaatgcgccgatgatggcgatggtggtcatgggaatcctttccgtgtggttgttcgtgaagagtgatggacgccgtttcagcgccagcgccgggcggacaccgcgtcggcgagctcgtgcagcagccgttccgtctcgtcccagccgatgcagcggtcggtgatcgacttgccgtagaccagttggtcgagcggggccgccggctggttgccgctttcgatgaagctttccatcatgatgccggtgatgccttcctcgccatcggctatgcgccgggcgatgtctcgcacgacctctgcctgccggtgctcgtccttgccggagttgccgtgcgagcagtcgatgatgagcccgtgggtggcggcagattccgccggcatcatcgcgcgcacgtcgtccatcgcacggcgcacggatgcggtgtcgtagttcggcccgtggatcgagccgcgcagcaccacgtggcagtccgggttgccgagcgtctccaccgcgcaggcccggcccatgtggtcgatgccgaagaacgtgtgctgctgcgcggaggcgtagcagccgttgacggcggccttgacggacccgtcggtcgcgttcttgaatccgatcggcatcgacatgccgctggcgagctggcggtggacctgcgattcggtgttgcgggcgccgatcgcgccccagctgaccgcgtcggagatgaactgggggctggtgggctccagaaattccgtggcggcggcgagtccttcgcccagcacgccgatcagcgtcttgcgcgcgagcagcaggcccttgcggatgttgtggctgccgtcgatgtcggggtcgttgatcagccccttccagccgaccgtcgttcgcggcttctcgaagtacacgcgcatcacgatgagcagttcgccttcggtctccttcatcaccttcgacagccggtgcgcgtagtcgagcgcggcgttcgggtcgtgcaccgagcaggggccgacgatgacgagcagacggtcgtcctgcccatacaggcaggcgcgtatctcgtcgcgcgagtaggcgacgatctcctgcgcggcggagtcaaggggcagttccgccaacacctgggccggggtgggcagcggttcgagctccagcacacggcggttgatgatacggctgacgcccacctgatcctcccagcgcggcacgcccgtggcgagcagcgggttcttgccctcgtccatggcctgccggatggcccgcagctcctccggcgtgttcagcggcttcgggccggcgtgacgcggcgtgccctgcggcgtacgctctcccatgttctgctgctgcatgacgtgatgtctccttgccttgttctctcccccaaggataaggcacggccctgtacttggccatacacgggccggcacacgggccgcgccggcccgtatccgccgcgcatgacgaacgtccccatgccccgcgtcgaacgggcacggggacattacgatgttctggagcgctgccgtctcgccggccgcggcgtccttgtagtcgccggccgcgatcgcgaccaccggcaacaccgccaggatcgtcttccagggagttttgcgccctgagtgccgtgccgattccgccatcacgcgccctccttcaccgacgcgaacaacgtcacgccttcgcccacagttgccgtgcattcatcatgatgagccatgccctttcagtcttctctgacttgcgccacgctgcggtcgcgcactaataccccccccctgcccgcgctggcacctatgccaacacgcgccggtatccgcggtgtttctcgaaggagaggaaccaccgcttgaactcttatgcgagcctaacatgaaacgggggaaaacgggggcacttgatttacacaagagttgttgtacaatatttcttgtcaattggatatcgcttcataacatgagcgcagcatcacacgcgacaggtgtcatgaggcacggaaggaacggacatggcacaggcttccgacacggcgcaaccgcagacgccgccccgccgcgacaaccccgcgacagtcaccgacacgaaccgcctgaaggcgctgtcgcaccccacacgactgcgcatactgaccgtgatgagcgacaccgaacccgtcacggtcggccagatcgccgaacagctcggcgaatcggccggaacggtcagctatcacctgaaacagctcgaaaaggccggattcgtcacgcaaacgccatcacccgacggagacaaccgcagaagctgctggctggccgcccaaagcagactggaaatcaacgcggacgcggccgtcgattcggcaatggcgacgacaatggatcaggtcagctccacgtttcggcaagaggcatggcagcgatacaggtcggcctctgacaacctgcccaaacagtggacggacccaacggtgacgagcagcagcgtgctgcggctgacaagcgaggaatacgcgcgcatgtcacaggagttgcgcgagctcttcaacacatggacatcacgcgacctcgcacacgaggaaggggacggctcgcaacccgtcatgctcaacatcgacgccttcagatggctgccataacggcggcctgacataccctctcaccccacgccctgcgcccacaatgcaatgggcgagcgcaagcatacgcaatttcacccctcgacgcacaacacccctcaacttattcaaaggaaacatcatgcccgaatcatcgcaggcgcaaaccgcgccacaccgcgaacgcacttccccgcaacgcagtgaatcgctgtggggcaaccccacatatcgtcaatggttcactgcagacaccgcctcgacgatcggagccgcgatgagaggcttcgcgatctcgctgatcgccttctcgctcacccaatcggtggtgctcgccggatggctcgccacgttcagccaaattgccacgcatgtcagcgacgtgttcggcggcacggtcgtggaccggcacaaccgcaaagggctcatcatcgccaacgccgtgttcggcacgctgctgtggggaacggtgttcgtgctgatcgccctgcatgcgatcgcattcccgatattcgccatcgtgacggtcgcggcgtcagcggtcaacggactactcgccaacgcgaccaacgcgatgctgcgcacgatcataccgacccgcgaatatccgaaggcgcaaagcctcaatcaggggcgcgattccgtggtcagcatcgcgggatccccgctcggcggtgtgctgtacgcggtcgcgccgtggctgccgttcgcggtcgcctcgctgatgtacgcgatcagcggtgtcagtgccgcccagctgcgcgtcgacgaacatgtccgcgacatggtgacgacagatcgcaagagcaagcgccccgacaccgcgtcgcaagcagactgcacgtccgatgccgccgtcgcgcccgacgccgatgcgacagcagagtcggcgcacacctcgttcttcgaggatttcatcgaaggatggcgctggacgctgcgcaggcacacgctgctggcgatctgcgtaatcgccgcgctggtgaatttcgggctcaacggcgtgttcgccgcggtgaacctgcaactggtgagcacccacgtggactccgtgcgactcggtttcgtcaacaccgtcatgggagtcggcatgctgatcggcgcggtgatcgccgcacgggtatgcgagcgagtgcacatgggcaccggtctggtcgtcctgtcggtgacgtcgctgctgacattgctgccgatgctgttcagcagcgattacctggtgatactggcgtcatcgctgatcgtcgggctgcccatccccaccatcaactcgctgctgatgggattcgtgttcgccaaagtgccgagcgagatgcagggacgtgtcgagtcggcgagcgacatgctgtcgatgatacccacgctgttctgctcagcgctcgccggctccctgctgccacgcatcgggttcggcgccacgattggcctgttcctggccgtgcttgcggtcaatgtggtcatcgcgctgctgatgccgtcgatccgctcgctccccgccgccgaccactgggacgacgcgtcgctgtgacgatgcatcactgaagcagcgtcaatgcaaaaaacggttcggcgcggcctctcgaacagacaaggccacgccgaacctacgtatatgctaacagccatgtattgtggcatgccccacctagcggcctaggccgggcaccggatcagagcgcgcgacgcgcgtcgatggcgtcggcgagcgtgtgcagcagctcctcggtgcgctcccacggcacgcaggagtcggtgaccgactggccatacaccagctggtcgagcggtgccggtttctgatgcccgcccttgaggaagctctccatcatgacgccgaggatgcccggctctccatcggcgatacgcgaggcgatgtcctcaatgacctcggcctcgacgttctcgtccttgccacaattgccgtgcgccgcatcgatgaccagaccgcgttcgctcggaccgctcgccttcgacgcgcgcaacgcctcaagcgcggccgccacggaagccgcatcgtagttcgggccggtgttcgacccgcgcaggatcagatggcagtccgggttgcccttcgtctcggcggagatcacgcggccatccaggttgatcgacaggaaatggtgctcgaacccggccgcgaaacacgagtcggcggccggcttgatcgaaccgtcggtcgcgttcttgaagccgatcggcatcgacatgccgctcgccaactcacgatgcacctgcgactccgtgttgcgcgcgccgatcgccccccagctgatcagatcgcagatgtactgcggtgtaatcggatccagccattcggtcgccgtcggcagccccaggccaagcacgtcggtcagcaccttgcgcgccagccacatgcccttgcggatatcgaagcggccatccagatccggatcgttgatcagacccttccagccgatcgtcgtgcgcggcttctcgaaatacacgcgcatcacgatcatcagtcggtcctcaagctcgcccttgagcgccgcaagacgctgcgcgtactcgtgcgccgctttcggatcgtgaatcgagcacgggccgacgatgaccagcagacgatcatcgcgaccgtgcaggatgtcgcggatctcctgacgcgattgcagcaccaggtcgctcatatcatcggtgagcggcagttccctgagaaaataccgcggtgccggaatcgggtcgagctggcgaatgttcacgtccaccgtttcagggaacacggcattcccgcccaaatgccgctcgtcctcggaactgtccggaccacgaagccctgccatcgctctgctctccttccgcaccgcaggccgacgtctttcgacccgcgccctcacgtcgcataccaataccgaacacacaatagtagatgccgtcggaatacggaaaacaacggctgcaatgcgggcacggcggagctgcgaagccgtcacccggcgaaagtcccattccggcggctgcgaatgggactttcgcgggatggagatggggcgctattcgcaggcgacgccgtcgccgtcgcgatcgagtttggtcgagtagccgggctgccctttgtatagcggcgctttgccggctgcacgcaccgcggcgcagttcttgtagtagacatcggaactgtcgccgtcagacggagcggccggctccaccaccgtgctcgactcggactgttcgcccgatgaaccgtcctgcgatgagctgccttgcgacacgtcctcctgcggcgccactgattccgcgccgtcgccggtcggaacggtctgggccgggcaggacgacagcacgcgcgacatcgcatcatgctcggcctgcgtcacccacagcgagtacttcgccttcacgccgatctgccgagccacgtatgagcagcggaacgatttgttggcgggcagccaggtcgccgcgtcgccgtcggacttgcgctggttcgacgggccgtccaccgcgagcaggttgtacgggtcattcgccagctgcttgcgccggtcggcgatcagctgctgcgcgcccttctgccatgcgtccgacagcgccaccacatgatcgatctgcacggccgccgaggtgctttgcccgcgcacgaaatcaatcaccgcggcggtgtacgggtcgacgagccgaccgctggtcaccacgcaattgtgcgtaccggccttgtaagtcttgttggtgaggtcacggttgaggatgtcgttgcgcgtgtcgcacccgttgtggtcgacgtcggcccatgccgcgccgaactggtcgcgcgaataaccggttttcggtgcacgtcccttgaccggcagcgtctccagcacgctcgtggcgagctgtccgccggacgcggaagccgagcttgacggttcggacgactcagccgattcggattgtccggacgactgccgctcagccgaccccgcatcggagccgggagttccgcatgcgccgacggtcaacacgaatgcgatcgggataagacacgtcagtattcgattgaatgtattgaatgatgtgcggcttccggccgacgctttcttcatcatgcagctttctctgggcttattccgctatgccgcaaccgatgcgcggccctctggctagaaacatcattgtcatccaacaatagcggaagaccgccgtcaatgacgattccccacatcgaacggcacattcctttcgtaaaatgtccatccgacacggggaatcaacgaaatcggtcattcagtctcgtgctcgacgcacgggccgatacctcgctcaggccagcgcacccatcggatcccatgcggggagcatggtggcgggctcggcgagcgcggcctgatactcggccgggagcatcgccttgggcacggccacctcgtacacgtactcggtgaaccagtcgtcgctcatcgtgaagtagcccttgtcggcaatcttgtcgccccaggagttctccacgcgccagcgacgggtcgtggtgccgtcatcggccacgtccacgccgacgaacgccatcgcatggttcatcgcggagtcgccgaagcgtacgcgcgactccttgtccatgtcgaagtccacatcgtagacgctgccgtactcgaacaggtcagtcgcccacgcgccgcgctcgcgatccatgaacggaccgcagtccgcgccgaaccacaccgggatgcccttttcggtcaggatcgcgcgcacgcaatccttcatgaactggttcggcacgttcaggtactcggtcgggttgccgccggccacgttgcccaggtgctcgatgccgatcttcttgcccttggcgtgctcgcggcgcggatcgtccacgaggcacacgtaatcctcaaggtcggcggtgcccacgtacttcttccagaactcgacgggcgtgatttcgccgtcgcggtggaacatgccctcggagtcggtccactcccagtcgaagctcttcggcggctcgcccaggtgaatcgtcaggatgcggtggccggcggcgacggtcttggcgacctcgtcgtcgatcgacgcggggtcggcgtacatgtgtgccacggcagtgtgcagcaggtggcgcagctgcgtgttcatagcgcccgtgttcttcgaggattcggtctccgggaacaggtccttcggcacggcaccgtacttcttgtacacgttcagcgccatcgtccactggcctccgtcacccatcacgtcggcgagcaggtgctggatcaggcgcgagtcggacggctctccggcacgaaccagcgcggcgacgtcctgcaggaagtagttgatacgctccagcttgtcgaagtacatcgcgtagttctgggagaactcgaactccttgacgccgaggttcttcttggcgacgaaacgggccacattcagcgagctgaacagccagcagcgaccggaacggtcctgatgggtgacctcgccgttgtcgacggtgacggagaagcggcgctgcagcagacgggaacggtcatagttcagcgcgaccttgtcgataccggcggcggtgacggcgttcatggccagacggttggactggctggcatcgaatgatgcgaccagatcgttcagctgctcgccggacagcggtgtgatttcagacgatgacatgttctcggtcatgctgctcctttgacttgggacgtgcgcggccggttttgtggccgcaatgaaacgtggcatccagcgtttgaccggatgccacgacgggtctctaatgagtgtagcggcgacagcggattcccgccatcgaaccggttcaataccttgattcggcaggagtccggcgacttctgcagccgcctgcaggccggacggcgaagcccggcatccgacgcttcggaatcccggccgactgctattcggcggtttcggcctcgccggcctcggtgtgctcggccgagtgctcggcggcatgctcggcgaccggctcggcggcgaccgcttccgcatcctgattgtcggcatgctccgcgacggcatgcgactcatacgccggcgccggatcatcctgcgcggcggcattgtacagcggcacatcgggcgctccctgatgcgacgcggcgccaggctgctccgccccctgctcgttcatgaacccgaatccgctgaacgccttggtaaacatcgaacgcagctcggacacgcgctgcgtgatggccgcctcacgcgattgcagctcggcgatgcgccactgaagatcctccagctcgacctgcgcggccttgcggcgatcctcgatctgcgacgccgcatcctcgccagccttttccaggatctgcgcggcctgatcgtcggcctccttgcgcttgctcgccgcatacgtgtcggcatcctcgcgcacggtcttcgcctggccgatcagctcgtcggattccttcttggcggccacgcgacgctcttcgaggttttcgagcagctcgctcaccttcttggtcgcttcgtcctgctgggcggcgatgtcagtgcgaatctgctcgacctcggcgttgacctggctcatcgtctgcgtgtggcggacctcggcgtcgtcgcgaatctcctgcgccttcgccttggccgcatcgataatctcgcccgccctgcgctgcgcgtcggccatcatcttggacacctgctcgcgcacgtcggacagtttcttgttcgcctccgcgagcgccgcctgaatctggtcgttggactcggacttgagcttggcaatctcctcgttcgcgctcctgcgctgcgaggcgatctgctgggtcgccttcgcctgcatctcggcgatctcgcgctcctgcttggcgcgctccgacgccatgcgcttttcatgctcctcgcgcgaattggtgagttcgagatcgacggactgacgctgctcggtcacgatcttcgccgtttcggcgcgcagctgggcggcgtcctgctgcgcgctggtcgtaatggtctgcgcctgattggtggcgttgccggtaatcgtatcggccttggcctgagcgtcatcgagaagatgctgcgcatccagcttcgcattgttgatcagcgtctccgcctgagccttggcggacgcgcgagtcgaggcggcatcctgcttggcacgctccaacagctcggtgctggtctgctccgcggaggcaagcatctgctgggcgttggcgcccaacgaggcgaacgtgtggttcttggacgactgacggttgcgctcctcctgcagcttcgcctgcaactgcagcagacgatccccgtcctgcttgatctgcgcacgcaacgcggccagcgtctgctgcgcgctggcaaacgcccggtccacctgctccttatcgtatccacgtatcacaatcgggaactggtccgccatgttcggttcctttcgccattacacctgctcgttagcacaaccacacacgactgtaccgcatggcgtcaagcccacgccagaaacgcgacgaaccatacgcgaacgtacacacatgccagcaagaaaccagctgcatcccagcaaaacgtcaggcgatgagaatatccccggacgacggctgcagataataacggaccgtctcgcgcaccacatcgcgcccggcacgcacctgctggcgcagatccaggccgttctgcagcctgctgccgccattgatcggagggaagctgacgaagccggccagcacacgatcctgtgtcgccgtccagtgcagcagctggtagaacagcgaattgcatacgaacgtgcccgcgtcggaactgagcgtggcgggtatgccgtcgcgcgcgaaatcgttgatgatggcccgcaacggcaaacgggtccaatatgcggccgggccgtccttgatgatcggctcgaaccgcggcagcgcgttgtcggcgtcagggcgggcagcgttcatcaggttcgtggcgcagcgttccatcgccacgctgtgcgccgcatgcttgagaccggtcgcgatcacgatgtccggccgggtcgcatccaaggtctccagcaacgtgggccaagcgttggcgaagctgaccgggagcgccacggtgttgatggacacgttggcgtcatgcagcggatcgtccacgtcggacggctccccgatgccgtcgcggacgagcgcctcgggcacttcgtacgacgggttgacgtcgatgttctcgtagtggtcgaacccacaaatcacgacattgagctgctgcatgatgccagtgtaccccgcgaacgcctgccgctgctattgctcgcggacctgggcgaacacctgatgcatccgttcgcgtgcgagacgcttgcggatctccagcgagatctgctcggcctggggcaggtcgtcgcgcgtggtgatcttcatgttggtccgggagccggccacgatggcgaccgggacgtcgggcaggtagtcgacgaccacgcgcgtatcatcggtcgggtggaaatcggggtcgcgcgaggctagctcgtatgcgcggcggatggtctcgaaccggaatgcctgcggagtctgcgcccggaacatgttcgcgcggtccgggacggagcgcacgaccttgcggtcgcccagatcctcggtgagcagcatcgtgtcggtggaggcgaatgcgactgtggctgcctcgaactcgtccagcgcggtgacgcagccgtcgatcgaggactgctcgacgaacgggcgcaccgcgtcgtggatcagcagtttcgcgcggggcgggatgccagctgcccccagcgcctgcagagccgccgcagtgctgtcggcgcgttcggcgccgccgtcgatgatcatgcgcaccttcgggtagccggcctcatcgaccaggcgttccacttcatcgcgcacctgcgggttgacgacgacgatggtgtcggtgacatgcggattctgctcgaacgcctcgatggaccagcagacgatcggcttgtcgtcgacgctcaccagctgcttggggttgtccggatcgaagcgcgtaccgaagccggcggccaataccacggcgacgaccggtgcttcgggttctctgtcatctctctgagtcataccgcccaccgtatgacccgccctgcccgattgtgacggaagccacactcttctgcacggaattttttctgattcgacgacgaacaggccgccggcaccggtgtcggccccgccgcaacgggctatctcgctttcaaggggttgatttcggctcggccgaacatctatctgcgtttcaaggggttgccaaaacacgataccgcgagtattaagcgccaaacgccattggaatcatgcggtttaggaccttgggctacttggccatcaacctcacgaaacgaagatagatgttcccgaccggtggaatcaacctcacgaaacgaagatagcggcccgattcgtcacaaccgaggcaaatcggggtcagccgcgcatgatcagggcgagcaggcgtccctcgtgcgtcttgccggcgagcgaggcgcggcggtgggagtaccacagcgggttctccagcgtgcacatgctgtggcgcacggtgctccagcggtcggcgagcgcaggctcgccttcgccgtcggcggcacacagcgaggcaagctcttcgtcttcatacaggtattgggaggcggcgttgacgcgcgggcgcgaatcgacgatgctgtcggcgggaacacccgccttggcaagctccatgcgggcggccttggcgatgtcgatgccggggcctccgaatcgcgtcagggtgaacgtaccggggaattgcgcgtcgaactcgtcggcgatggcgtcgccgacctcgtagcagtcgccgcagatgcacggtccgagcgtggccgcgatgcgctccggcgcagcgcccttggccaccatcgcatcaatcgtggcaccgatgatgccgcgctgcaggcccttgcgcccgcagtgagcggcgccgatcacgccggcctgggcgtcggccatcagcaccggcaggcaatccgcagcgaacatgcccagcgccacacccgcgcgagacgtgacttgcccgtccgcctccacgacggtcgcggcctgcgcctcgccgtcggcggtcacctcaccgggcgtgccggacacatcgaagccgaacggggtgttcagatgccatgatgcatccacgtccaccgcacgcccggaatgcacctgactgaccagcgagagcccgcagccgacggatttcgcgagcgacacgcgattggcgagaatcgcctgcaggtcgtcgccgcccttgccgccgagattgcaatcgccgaaatctccgtggctcaccccgcccaagcgcgtggtgtagacgacagtgacaccaggcgccagcgcgatcgggatcgtcactggaaccgggttgccctcctcgtcggtggggctgatggcgttgctgtccagaatctcatcatcaaactgcgtatcgctcatgattccttatcctatgtgattgcgtgctcttcggttcggcgattggcgtcaggcggctttgagggtggggtgcttggtgcgggagcggatcgcggcgttgaccggcacctcatgcgggcacggcatggagaacacatgcgccggattgttgatggcttgcacccagttgccgtcggcgtcgcgaaggccgctttcgggcacggtgtagatgagtggcgcgtcgcccggcagcaggaattcgatctcctggccgggttcgatcttgttgcggctcatcagcgtgacgcgaccgccttcgtccgggctccacgacagcacttcgccgacgaccagccatgagcggaagtagccgctgcggttggtgttctcggtgaccttgcggtccgggtagtagaagccggtggagtattcgcggtgagcgaccttgtagggttcctctttcaaccattcgggcagtgtgacgggcggcgcgggcgcgacggccgcatgctgccagccgttcgtgtcgatcggggactcgtcgcgcgtgttcgatttgcggcgcgtgctgcgggcctgttgttcaagatcggagatacggtctggggcggtggggctctggccgacttccaggacgccgtcgtcgccggggacaccggcgaaggcgacgtcggcctgttccatgatgtggtctgtgagatcggcaccggacagttccgccgcgtacgggtcatcgttcagccagacgggggcgggcgcgtcggcgcgaatcacgcggtcgtggaacgggcgcagtgtgttgccgtccgcggcctcgaaaccgcgctgcaccatgtattcgttgacggcggtcttgtaggcgttggtcatcgcggcgatgtagtacgcgcttttggcccggccctcgatcttgaggctggtggcgccggagtcgatcaggtcatccaggtgctccatcatgcacatgtcctgcgagttgaacaggtacgtgccctctttggtctcctcgaccgggaagtactggccgggacgcttctcctcgaccagcgagtacttccagcggcacggctgcgcgcattcgccgtggttgccgtcgcgaccggtcagatagttggagatcaggcagcgtccggagaacgccatgcacatcgacccgtgcacgaagcattcgacatccatgtcgtcgggaatgttggcgcggatgtctcgcacggcctgcagatccatctcgcgggcgagcacgacgcgtctggcgccgaggtcgtacagcgcgttggcggcaccgtagttcgtgacgcccgcctgcgtggagacgtgcagttccagctcgggggcgacgctatgcgcggtcatgagcacgccgatgtcggtgacgatcagcgcatccacaccggtgccggccagctggctgatgtattcctggatggccctgacctcgttgttgcgcggtagcacgttgcaggtcacatatacgcgggcgccccgcgcatgggcgtagcgggcgccctcttcgaagtcctccaggctcaggttcttcggagcacttctcatgccgaacgccttgccgccgcaatatacggcgtcggccccgtaatcgaccgcagccttcagcccgcgcaggttgcccgccggagccagcacttccggcttacgccgggccattcgttgttgagattcaagcaccccaccagtgtagtgcatggaatctggtgccaatgtcgcgcctctgacatcaggcgtcaagtacccccccccttaacaaaatccgctcccggcgggttctagtgaacgttgcaacacctgacctaccgcaaggagggtcaggtgaccgggagccaccgaaacgaagaccgtggcggggaacgccgttgggcgttcaacggcgtcgaatatccgacgaggaagctgatgtgcgaggcgaggcgcgaggagtacgtgcgtctgccggacgaggagggcatgaacttcacccaagccgcccatgcggtcggggtctccaagcgcaacggcaaggtatggcgcaacgggcgcacccgcgccaccgggaggaacaaaaaggcaagcatggactggtatcgttccaccatggacaaacccaaacggatccacgcgcgctacctcaatcaggaggagcgcatcccgatcgccgaccggctgcgcccgggcgattcgatccgcgccatcgcccggctgtcgggacgcgaccccggcgcggtcagccgcgaggtcgagcgcaacaggaaccccgggaccggcgactgcgagccctgccgcgcccagcagaaggcggccggccggctcaaacgccccagaccgcgcaaggcggccgacggcacgccgttgtgggcggagataccggccgggttgcgcaggcattggagcccggagcagatatccaaccggccgaggcggaggaccgggcggtccccggccactgggagggcgatctcatcaccggcagccgcaacaaaagcgcgatcggcacgctcgtcgagcgcaccaccaggttcacgatcctgctgcacctgcccgacgggcacgacgccgaacacgtccagcgggccatcatcgacaaaatggcctcgctgcccgaactcccgcgcaattcgctgacctgggaccagggagccgagctcgccctgcacaagcgcatcaccaccgcgccggacatgcaggtctacttctgcgacccgcacagcccgtggcggcgcgggtcgaacgagaacaccaacggactgccgcgccggtacttccccaaaggcaccgacctatccgtccacccggaggactacctcgacgcggtcgccgaggaactcaacgaccggccacgcaagaccctcggctacatgaaaccaagcgagaagatcatcgaactgctcgacgccgcgtgatagcctcaacaaccgacaacgtggccatggaaggccgctcaaacctcaggtgctgcaaccaccactagaatccacctcatgcaacgcatgactggggtggccatgccctggagtcgcaagactccagtgagactacaaaagcaggctctcaaaactcgcggatagacaaggaaaaccgctattccaccggtgtatctgcgagttttgagagcctgtcgccttaaagcctcacaagctcgtcgggggtgagctccaaatcgccggcatgcaggctgtcgaggatggtctcggggcggtgggcgccggggatgacgaagacatggtcgcccttggcgagctcccacgcgagcacgacctgctggtaggagacgccacgagccgccgcgatctcgcggaacgggtcgaacttggtttcgtccttgggcttgcggaagccgcccagcgggctccagcacacgaagttcagaccgactttcgccgtgtattccagcgtatcggcggtgtcgaggtagatcggcgagtactggttctgcacggcgatgagcttgtcgccgaggatgccgcgcgcgatgtcgatctgctcgatggaagcgttggagatgccggcctcctgcgccacgccctcgtccaccagctgcttgatggcttcgacggactcgttgtacggcaccttcgggtcggggcgatggaagtagagcaggtcaatcgtgtcgacgccaagcgcgagcgcgctctccttgccgcgcttgatcaggttttcggggcgcccgtccacgtcccaggtggggcggccgtcggtgaagttgcggaaatgaccgaccttggtggcgatggtgacctcgtccttcggaccgttccaagaggccatggcctcgcggatcagcttttcgccggtctgctcttcgccgccggagcagtagtaggcccaagccgtgtcgaggtgacggcagccggcgtcgagtgcggcgtggatggtctcgatgcccttatcgtggccgaggttgttctcgatggtcagcggcatttcgccgaggccgatggcggtggtgccgaacggaccgaggttgcggtgcagtaccatgtgcatctccttgatggtcatatagtgtcgccctccacaatacgccgaggccgcggcggatacgaccccggtagcagcgaacggttctcaataagaaacatgcgaggattccgcacaatttcgcacaatcgcacaaataggcaaagtcccggaattccagggctcagccgattttgatgttcatttcggccgacagcaggctcgcacctttcttattgagaaccgttcgctgctacaaatccgcccggagaccgctcatgtgactatccccacatttcacaccgacaccaaaaatccaccatcgcccaaaatcggcatcatcccaacgaaacactacatatagtgaccacacactgcgcgcgacacgacttgtaggggttcttgactgcaaattacaacgctgtagtctgagcgagtcaacacgttcaccccagcgcatcaagggagcaacatgaccgtcaccgtgttcaccaaaccgtattgcccgcagtgcgacgccaccaagcgccagctcaccaagcagggcgtgattttcgagaccgtgaacctggagcagaatccggagaccctggcacagctgcagcaggccggcttccagcaggctcccgtcgtgatcacccccgatgcatcctggaccggctaccgcccggacctgattcgcgagctggccaagaaactggccaagaagaccgcgccggtggccgcatgaacggccgcgcccccgccacccccggcacgccccagcctcatccgcgcagcaccccgatcgacctgaccgccgcgcacgccatccccgccgccgacagcaccacgcccagcacccccgagcagccggccggcaacacggtcgagcacatcggcgcggtcgtgtacttctcctccgcctccgagaacacggcccggttcatcgaatcctgccagctgagcggcatcggcatcgccgtgtaccgcatccccctcaagccgggctcggcgccgctcaacgtgcgcgagccgtacgtgctgatggtgccgacctacggcggcggcgacgcgaaaaaggccgtgccgccgcaagtgaagcgcttcctcaacaatccagcgaaccgcgcgtggatccgcggcgtggtcgcgtccggcaacaccaatttcggcaccgcatactgcgcggcaggtgacatcatcgccgcgaaatgccgcgtgccgttcctctaccgtttcgagcttatgggcacgcgcgaagacacgcgcaaggtgcgcgatggactcgtgcgcttcttccgggaccaccgcggctgaacgcgccacaatcaccgttattccagttactccaagggaaaactatactcatgactgacttcaccgacaccgagctgccgctcgacaacaccaccgacaccactgtcgagcagtacgatccggcgcacgactaccatgcgctcaacgcgatgctgaacctgtatgacgccgatgggcgcatccagttcggcaaggacaaggccgccgaacgcgaatacgtcaccggccacgtggccacgaacacgaagcgcttcgaatccaccggcgagcgcctgcgctacctgatcgaccaccagtattacgccccggcggtgttcgaacgctactcccccgagttcctggacgacttctacgcgcacgccgaatcctccggattcgagttcggcacgttcctgggcgcgttcaagttctacacgtcatacgcgctgaagacgttcgacggcaaactgtatctggaggacttcccgcagcgttgcgcggcggtcgcgctcgaattggcggccggcagcgagcagcgggccgtcgaatacctcgacgagatgctctccggcgcgttccagccggccacgccgacgttcctgaacctcggcaaggcgcagcgcggcgaggcggtcagctgcttcctcgtgcgcatcgaagacagcatggagtcgatctcgcgcggcatcaacgcggccctgcagctgtcgaagcgcggcggcggcgtggcgctgctgctcagcaatcttcgcgagctcggcgccccgatcaagcacatcgagaaccagtcgagcggcgtgatcccggtcatgaagctgctggaggactcgttctcgtacgcgaaccagcttggcgcgaggcagggtgccggcgcggtgtacctcaatgcgcatcatccggacatcctgcgcttcctcgacacgaagcgcgagaacgccgacgagaagattcgcatcaaatcactggcgttgggcgtcgtaatcccggacgtcacgttcgagctggccaagaagaaggccaagatggcgctgttcagcccgtatgacgcggagcgcgtgtacggtaagccgttcgccgacatttccgtcaccgagcattacgacgagatggtggccgacgaccgcatcaggaaaacctatatcgacgcgcgcgagttcttcacgacgctggccgaaatccagttcgaatccggctacccgtacatcgtgttcgaggacacggtgaaccgcgcgaacccgatcgccgggcggatcacgatgtcgaacctgtgctccgaaatcctgcaggtgcaggaggcgagctcctacaacgaggacctgacctactcgcacgtcgggcgcgacgtgtcctgcaacctcggctcgctgaacatcgccaaggcgatggacgcgggcctggccggcaccgtcgagacggcgattcgcgccctgacgtcggtgtccgaacacacgcgcatcgacgcggtgccctcgatccgccgcgcgaacgatgaagggcacgcgatcggcctgggacagatgaacctgcacggtttcctcgcccgcgagggcatccagtatggttccgaggaagcgctcgacttcaccgacatgtatttcatgacggtcgcctaccacgcctaccgcgcctcgcacacgctggccgtcgagcacggcacggcgttccgcggtttcgccgattcggcgtacgccaagccggccggcgagggcaattatttcgacaagtacaccgacggccgccgctccctcgccccgcgcaccgaactcgtgcgcgccctgttcgagcgtttcggcgtcgcgatcccgaccgaggccgactgggccgagctgcgcgacgacatcctgcgcgatggcatctacaaccagaacctgcaggccgtgccgcccaccggctcgatctcgtacatcaaccattccacctcgtcgatccatccgatcgcctccaagatcgagatccgcaaggaaggcaagctcgggcgcgtctactacccggccgcctacatgaccaacgagaacctcgaatactacaaggacgcctacgaaatcggctggaaggccatcgtcgacacctacgccgaagccacgcagcatgtggaccagggactctcgctcacgctgttcttccccgacaccgccaccacccgcgacctcaacaaggcccagatctacgcctggcgcaagggcatcaagaccctctactacatccgcatccgccagcaggcgctggaagggaccgaggtgcaaggctgcgtctcctgcacgctctgaggaatcgatggatgatgtatgcgtataccgcctttcttcggcgctcgacgtaccttcgtacgccttcggcctcagacggcggtctccacacacgtcatccaccgattccgctccacagccctgcgcacgcccgcaactcaaggaacccacatgtcgccaatgatctaccggctcatactccgtctgaccgcgccggaggagtttgaagacaaacccgccgacgacgagatcgacgtcatccgaaagaacgtaacagaccaccccaacaacgaaagacagacaaccatggcaccaatctccgtaccgcgcaaaccgctcaagctcatcgaccgcgtctccgcgatcaactggaaccgtctggaggacgagaaggacctcgaagtatgggaccgcctgaccggcaacttctggctgcccgagaaggttcccgtctccaacgacatccccagctggcagaagatgagtgacgacgagcacacgctcaccatgcacgtgttcaccggactcacgctactcgacacgattcagggcacggtcggcgcggtctcgctgattcccgacgcgctcaccccgcacgaggaggccgtgtacacgaacatcgcgttcatggagtccgtgcacgccaaaagctattcgagcatcttctcgacgctgtgctccaccaaggagatcgacacggcgttcgactggagcgagcgcaacgagttcctgcagaagaaggccgaaatcgtgctcgactactacgagggcaacagttcgctgaagcgcaaggtcgcctccacgctgctcgaatcgttcctcttctactccggcttctacctgccgatgtatttctcggcgcacgcgaagctgacgaacacggccgacgtgatccgtctgatcatccgcgacgaggccgtgcacgggtattacataggctacaagtatcagcgcgggcttgagcgggtgagcgacgcgaagcgcgaggagatgcgcgagtacacgtacaacctgctcaacgagctgtacgacaacgaggtggaatacaccgagtcgctgtacgagcgtgtgggactgaccgacgacgtggagaagttcctgcgctacaacggcaacaaggccctgatgaacctcgggtatccggcgctgttcccggccgaggcgtgcgacgtgaacccggcgattctggcggcgctgtcgccgaacgccgacgagaaccacgacttcttctccggctccggctcgtcctacgtgatgggcaaggccgaggagaccgacgacgaggactgggacttctgacggatgtgtgccctcgcacggtggctgaaattgcgtcaccgtgcgagggcgcacacagtgacggtggccccacacagtgacgctttgagtggtacccctgcgcccctcagcgcgacggttctttgcatgaggggctatcaaccgttggaatcgcaccggttacgcgcgtaggcgttcgccagcggagtggcggcgctggcggccacgttcacgaccatgctgaaccgcggcgaccacgcgatcttctccgacacggccggcacgctgctgtcggtggacaatacgttcatctcgccgttcaacgcatggctcatcaaccgcggcttagtcacgctgccgctgcgcatgaggcagcacaacgcctcggcccaggccatcgccgaacacctgcaatcactgccgcaggtgcggttcgtggcgtatccggggctcgaatcgcacccgcatcacgcattcgccgccagccagctcgcccgcccggacgccggtttcggcggggtactcgcgttcggactgaacaccgaccatgacggacacaaccgtttcgtcagcaaactcaacgtcatcacgtcggcggtgtcgctcggccatgccgaaagcctcatcgtgtttctgggcgaagacgacgaacggcagtacctgtatccgtccgagttccatcagggtttcttccgtctcgccgtcggtctggaggatatggacgacctgattcgcgacatcgaccacgcgcttagctgaggttgcgctctcaaaactcgcagatagaggggctttccggtccaaaagcccctctatctgcgagttttgagagtgtgacttcagcggcctccgaaagatccgccgccaatgccgccggaggagcccccgaaaccgccgccgcccgagaacgaaccgcccgagataccgccgaaaccgccaccaccggacgtcgccgcgtggatgacggagccgatctcggagaaaccggcattcagctgcgcgccgaagtcaccgaagttcgcgctgaacgacgccgggtcgaaaccaccgccgacgccgccggcacccgccccggcggtcggaccgcccatatagccatacccgtacgggcggtagctccagtacagcagcgagccggcgccatgcgcgtccagccattgcggatcggtcacctgcgggtacgccttggcgaactccgccatcacgcggtccgaaataccgaacgccgcggcatacaccagataccggtcccacagcaccatgtcggccaccccgcggtcactgaaattgctgaaatcctgcagataccggtacagtccctgcacctgtcccgcataccgttggccggaagacgtcagcacgctggacgcagcatatgcgcacacgacgatcgacagcatcatgatcggtgcggaaatgatcagcgccagtgcgatattgccgccgaacaccgcgatgatgccggagaccagcgccagtgcggcgccgaggccgcccatccagctggccagcgtgccgccgttgcgcgtcgctccgagcatcgcgaactcggacgagcacgcttcggtgaacaggttcagcgccttgtacccgttcttccagtcctcgcaatgccgcttcatgccgtccagatcgaacacgggagagccgacgcgcttggagaccttctgcatcaggctcagcgcggcacgctcgctctggctcaggttgagctcccgctccgcgtccttgtcgaatcccgccggcagcagcactatggtcatcgtcttgcccagcgacttcgccttgccctcgtcggcgccaatcatgccggccagacgcacgttgtcggcattgctcatgtcgacgccccggtacaggctcgacggacccggatagatggcgatcgccttcttcgaggcgagcgacagcatcgtcgccgtcatctgcagcgagtcgacactgcccttggacagtcccatgacatccgccatctttgcggccgaggcagggctcatgtccggcggctcacgccagtattcgatgtcgccgtggtattgggattcgcgatagctgcgcaccgccgcgaccatgccgatgacgaacagcgccaatccggcgaggactactgcgatccacaaggccacgcgcacgcgggccgggccagcctgctgttgccgccacgcgatttcctgctggccttcggattgcttcagcttcggcaggtacgtgcggccggtctgctggcgcacccacgcggcatcgccctgccgccatccggacggaggcttgacggcggaagcgtcataggccgccaccacgtcgagatactgcccggcgcgaacatcggacgcgctgaaacgcagcgagccgtcgtccatccgggaggtttcggagacgccggcgtagtgcagccatgcccagctgctggaggcgtcgatgccgtcggggaagcgcacaattccggtgaccttgccgatggggatcaggttgctgtcaccgaacggctcccactgccacgatgccacgtccttgtagagcgtggtgccgccgtggagcgtcatcgtcacgtcgaacttgagactgctggcttttttggtcgcagggatgttccagccgatctccacgtctttcgaccgccgcgaggtcgtgttgtcgctgatttcgtacccgtccttggcgggatcgaacggctgggggttctcggccccgtcggtcacgtccgcgatgtaccagtgcccggcgtattcgcggtcccatgacgtatcggaatggtcggccggcgatgccagcgcgccctgctcatagttttcgccggcagtgacgttgcgcacgctgatgtcggtgatgttggtcaggccgtcctctcgcagcgtgtacttctggtacagctgccgccatggtgtgtcgccgtcgcgcgtgcggagcttcatgtcgatgtgctgggtaaccttcaggctgccgtcggcctgaaccgcgacgtcatagtccagcgtgcggtagctcaggtcgggcgagcttccgctcagcatcaggccggcgccgatgacgatggcgaagacgacgagtgtgccggccaacgccgttgccagcgagcggagcagacgtttcaggttcatggcgatctccaatgatcagcagcggcgatggttccggcggtcggtgacgtcggacgtcggatgtcagaaacgcacctgcggcacctggcgggacccctcgtcggcctggaagtactgtgcctgctcgaagtggaacatgccggcgatgatgttgctcggcaccgtctcgatcttggtgttgtacttgagcaccacatcgttgtagaactgccgcgcgtaggcgatcttcgtctccaggtccttgagctgcgcctgcagatccatgaagttctggttcgcctgcagctgcgggtacgcctccatggtcgcctgcaggttgaacagcgcgcgggacagcgcgttttcggcggcggcacgctcgacggtggtcgcgttcgggttcgccgcggccgcgacggctccggcgcgcgcctgggtcacctgggtcagcacggaggattcatgcccggcgtaccccttgaccgtttcgaccaggttcggtatcaggtcggcgcgctgcttgagctgcacgtcgatctgtgcccagccgttcttcacgcgattgcgcagcgcgaccagcgcgttgtaggcaccgaccgcccacagcaccagcgcgatgatgacgacgacgactatcgccagaatgatccaccccatgtgcactccttcgcatcgttgttgacaccattgaagcatgactatgtgagatgatacgtcaccgtgtcgccgtccatgcccgcccatccgcacggtatcatcgaaggacgtggccgccctcgccggtgtcgcgcagagcaccgtgtcgtatgtcatgagcggcaaccggccgatctcgcagaagacgcggaacaaagtcgagaaggcgatgcgggaactcggctacgtgcccgacgcgcacgcccgggccatgatcagcaaccgctcgcacatcatcggtctgctcaccgaaaccacgtagaccacgcaaggcgcggagctgttccccatcctgcgggccatccgcgccaccgcgaaggaacacggctacgacctcatcctgatgtcatcgaccggcacgaccgaagacctcgccgacatgcgtcggctgggcaaaggcaacctcgtcgacgcattcatcatgctggacatccggcatcatgacgggcgtctgaaatccgcaatgaaactcggcctgcccatcgtgccgtacggcgaccccggcgagccgtaccactaccattgcgtggactccgacacgaaggcgatcgtgggcatggcgttctgggagatgcacgccatcggcgcgaagaaagcggtgatcgtcgaggacccgcgcggcgaccacgagtttccgttcatcaacatcttcgaccgggagagcgtcatatgcgccgaacggcatgggatacagctggaacggttcgagccgctgacagggaagttcccggagtggaagggcaacggcgtgttcatttatacccgctcgccgcggacgctggcgtggatagagcagatgatgctgctcaccggcgtcgccccaggcaaggacatcgggctgatcggcgagggcggtcgaagtcgccatcgagcagatcgaaggcaaggaattcgagcccggcgtagaacgcacgccgccgagattcacccgccgcgagaccacgattctcggattcgcgggctgaggccacacaaggggcatgcggcctttgccgcaggccacatccggaaacggtgccgcctcacttaccgtggcgaatgccccgccaggccggatcatccccaaattacgggttgaaattgtcgatatctatgattccccgtgcgaaatcgccgttttagggcccgaaagcggcgatttgacacggggaattgcgaataacgacaatttcaacccgtaatttggcgtgcagaatgggcgtgcggcacagaaaacacaaaaacggggagccccgtgatggggctccccgtaagtgaagcgcaggctacccgcgttggctcagaggacgccggctctcggacgtcgagccgttagcgcgagcggccatgccgcaagagatcagttctcgaacggatcgaagtcgcgacgcacgcggcggcgcggacgctcggagcgctccacgcggtcggcgcggtactcgtcgtagttctcgtcggtcgcgtaacgcgggttgcgatcgtaaccgccacgacggccgccacggcgatcatcggaacggccgccacggcggtcgtcgcgatcgtaatcgcggtcgtcacggtcggaacggcgacgcggacggtcatcgcggtcatagccgcggtcgtcacggtcgtcgtagtcgcggtcggaacgacgacggcgcgggcgatcgtcgaaatcgtcatcgcggtcgtcacggcgggaggagcgacgcggacggtcgtcgtagtcgcggtcgtcacggcggtcatcgcggtcggaacggcgacgcgggcctccgcggcggtcaccacggtcgccacggtcgtcacgacgaccacggccggcgttgttctcctggtcctcgaaaccggggatggcgagcgagatcttgccgcggtcatccacgccctgcacgacgacctcgacggcgtcgccttccttgagcacatcctcgacggcgtcgatgcgctcgccgttggcgaggttgcggatctgcgagatgtgcagcaggccgtcggtgcccggggtgaggttgacgaacgcgccgaacgacgtggtcttgacgaccttgccgttgtaggtctcgccggcttccggcacgtgcgggttggcgatctggtcgatgatagccttggccttctcggccgcttcgccgccttcggaggagatgaacacggtaccgtcatcctcgatggcgatctcggcgccggtgtcctcctggatctggttgatcatcttgcccttcggcccgataatctcgccgatcttgtcgaccggaacggtggtggtgatgatgcgcggggcgtactcgctcatctcggccgggccgtcgatgcactcgttgatgaggtcgaggatcgtggtgcgggcctcgtgagcctgctgcagggcaccagccaggatatcggccggaatgccgtcaagcttggtgtcgagctgcagggcggtgatgaactcggaggtgccggcgaccttgaagtccatgtcgccgaacgcgtcctcggcgcccaggatgtcggtgagcgtcttgaagacgtgctggccatcgacgtcgccggagaccagacccatcgcgatacccgcgaccggggccttcagcggcacgccggcggcgagcagcgacagcgtggaggcgcacacggagcccatcgaggtggaaccgttggaaccgatggcctcggagacctgacggatggcgtacgggaactcctcgcggcttggcagcaccggcacgatggccttctcggcgagggcgccgtggccgatttcgcggcgcttcggggagccgacgcggccggtctcaccggtggagtacggcggcatctcatagttgtgcatgtagcgcttggactgcgggccggaaagcgcgtcgatctgctgctccatcttgagcatgttcagcgtggtgacgcccaggatctgggtctcgccgcgctggaacagggcggagccgtgcacgcgcggcacgatgtccacctcggcggacagggtgcggatgtcgcgcaggccacggccgtcgatgcggtagtcctcggtgaggatgcggcggcgcacgatctggcgctgcagctccttgaacgcgttgccgagttccttctccttctcggcatcgtccatgtcggtgaactcgttcgcgagcacctcacgcacgtgctccttgatctcgtggatgcggtcctggcgcggcagcttctccgcgatggacagcgcctcgttgaggtcctcgtgggcgatctcgtcgatgcgggcgtacagctcgtcggtgtactcggggaacagctggaagtccttggtctccttggctgccttctccttgagctcgttctgggcttcacagatcaccttgatgaacggcttggcggcttcgagaccctgcgcgacgacttcctcgtccggcttgatctggccctcgtcgtagatgaggtgccaggcgttcttgccggcaccggcttcgatcatggcgatggcgacgtcgccgttctcgatgacacggccggcgaccacgatctcgaacacggcgcgctcacgctcgctccagcgcgggaaggcgacccactggccgtcgatcagcgccagacgcacgccggagaccgggccttcgaacggcaggccggagatcatcgtcgaagcggaggccgcgttcagggcgatgacgtcgtaggcgtcgtcgggatcgatggacagcacggtctccacgacctgcacttcgttgcgcagcgtgtgcgggaacagcgggcgcagcggacggtcgatgatacggcacgccaggatcgcctcggagctcgggcggccttcacggcggaagaacgagcccgggatcttgcccgcggcgtacatcttctcctccacgtcgacggtcagcgggaagaagtcgtagttctccttcgggctggaaccggcggtggtggtggacagaatcatcgaatcatcgtcaagataggctgccaccgcgccatccgcctgctgtgcgagacgacccgtctcgaagcgcagggttcgttttccgaacgaaccattgtcaataacggcctccacggccttgatttcgggaccctccatagggttcctcctttttttgttctattgtctgctgatatctgtaatccacatcgagacgccgaaatcccgatttgttcaagcttgtcggcttttctcattgacgcggcccgtcccggaccgcacccgttcattccagattcttcttcatcatcggccctcaaccgccgggccacagtatgtcatccgcgaattcgcaacatcctcatccacatgccgatatgcaaaacgcccgagcaaggaatgcccgggcggaagttctcttatcgacggagaccgagacgctcaatcagggaacggtaacggttgatgtcgacgcgcttgaggtaatcaagcatacgacgacggtcaccgaccatgagcagcagaccacgacgggagtggtgatcgtgcttgtgctccttcaggtgctcggtcaggtcggcgatacgcttgctcagcagcgcgacctggacctcgggggaacccgtgtcgccttcgtgcgtcgcgtacttggtgatgatttcctgcttttcttcagccgtaagtgccacggcatcctccttatggttgctgcgcggtgcacccggctctatgccggtgcgctctctatccgcgggcgaaacacgccaatgggatagtataggcaaggggtcggactacttccggcctttcgcggcagggtctcacaccgccgtcagcaatccgccgaacagcacaatgagcagcgccgcggtctcgatggcgaagaacaggatgaacgaagcccagctgcgcgtcagcacgttcagcggagagtccttcttgatgaggatcagcaggccgacccacacgaccgcatacaccgccacgccgaccccggccgcgatgattcccagattcgccgcattcggcagccgcgcggagtcgccgtacaccacgtacgtggagtaccagaaattcagtttgagcaggctcaggccggcgatgaactgttcggcggccagcccgaccacgaacacgatgcgccacagccagttgcgcgactccaccacggcgagaccgagtccggtgaacgttgtcagcgtcacggtccacgacacgaaggccacgccgcgcggggtgaataggttcagatgggtgatcagccattgcgtgtggccgaccgccagggagcgtccgagccagtacggcgcgatgatggcggccagcaccgccacgatgaacaccgcccatggcaccgggtgcgactgccgccgctcgatatcggccagagacaggtcggtcaccgggatggatgggtccggatgcttggaaacgtcaacggtttcgacgtggtcaccgaccagttccgtcgcctcgttgttattggtttcgtccgccatgttcgcctcgctcgccatatgttctttactgacttccatgcacgacaatacgggctgaaatagacggaatccgggattcaccgtacaatatcgccgtttcggcaccgcgaaacgtaccatttcgtacggagaatcttggattccggccatttcagcccgtaattgccagcgtcgtccgggccgacgccccggctctcacgagcgagggcgaccgcccggactcatgccgaatcagccgatccgcttgcgcaggcaggccatcgtcacgcccgccgcggccaacatcgtcattgcggcgatgagaccgaagacgtcggcgcccgtgttggacagcttgccgtcggcgccgggcttgttgacacccggcttctcgccgggcttgttctcgccgggcttgttctcgccgggcttctcgccgggcttctcgccaggccgctccggctcggtgccgtcgctcttgaccaggcccttgatggccttgtcgagtgcagcgcgcagcgcggtgtaggtggcgggatcgccctcgccattcgggtcggccttcagctgcttgctcagggcctcatacgcgacggtgaacttggcatagctgtccttggtgtactcggaggccttgcccacgtaaggctcggcgtcgttcagcgcgagctgcgcgtagtcgcgtgcggactggtcgtagcgcaacgcggacttcgcggcggtgtaggccgcttccagcgcctcgccgtcggccttcgccagatcgtcggcgttggccagcgcggcggcgaagtcgtcgtacgcggactggtacttgttgtagctcgcctcggtgtaggtggcattgtcgttggagacgtgctcggccttcagctggtcggcggtcttcgccgtgtaccgttcgacacccttcatcgccgattcgagcgcggcgacggcggcgtcgaccttggcctgcgtggcgtcctggtcggcagcgacggccttggcggcagcaatcacgtcggcgagagcctcgcggctcgacttggtccagtcggcggagtcgaccttctcggcttcggcgaccttggcgttcagcgcgtccttggtcaccgtaccgggttcgtcgatcttggtggcggacaggtcgtacaccttccaccacttggaggtctgggccaagttggtgatgcgcacggccttgacggtcgcggcggagtccagcgtgaagatctgcttctggttgccgttcacgtcgccgatcttggtccagttgccatctgcatcctggtattcgatcttgccgttgacgatcgtgtcaccgcccttttccgcctggatgaagcggaactccttggccttgcgggcctcggcgtaggtgacggtgagggcggcgttggccttgacacagtcgcagccggcggactgcatccagaagaacgtgctgtcgtcaccgtcgatgacggccttcggatcgacgttctcatgccatgccgcggcacccacgccgttcgtgctgaccgtggcgtcggagggcatcggggtgacgctgccgctggtcttggccttgacgaaggaatcgagcgcctgcacggtcgggcgcatgatgaccaggccgccacgggcgggcttgttgcgctggtagtaatcggcgatcgtatgcgtgtcggacttggcgaaagcggccttcgcggttgcgtaggtcgccttcgcggcctcggtgtcacccgcgagcgcctgcttggcggcggtgatgtagtcgatggcggaggcggtcaggtcgtcccagtagctgatccacggttcgatctggtcaaacatgttcttgtcgccggggttcgcgcggtagttcttcgcggcgcgctgcagcgtggtgtagacggtgagcgcctggctgaagtcggccgcggtggcggtgccgccgtccagcttgcccttgagttcggtcaggacgcccttgacgtcgagcttgccggtgtagtcgacggactcattgttgatccaccacttgttaacggcgtcatactcggcatccttgtgcgcgccgtcgatgccgccgtcgttgaggatgcgcatgttcatggcgaggtcacgcaggccacgggagcccttggacgcgatcggcgagttgtggtcgatgtagctgaaggagtcctcccaggactgttgtccgtccttttcgctctgccacaggttccagctgtagtcggcggccatgaagatgccctgcttgctcggctcggactgctgcatcgggttgagcatgatgccgtcgtaggtgccgtatgtggcaccgggcttgaggaagttgttctggcctcccatgaccaggtactggtaggcggtgttgcggttcatgtcggagcacggccagttgatccacatgaacggggcgcgaccggtgttcttggtgaacgtgtcggcgaagtccttgctggccacgccgaaggtgcggccgccggtcatgacgatctgcacgttggatgggatgtccttgtaccaggcgtcaccggctccggtgtagctgtacagggccgggcagtagaggatcgtgtccttgaggccctcgtacttcgcggtgccgtcgtcgttcttctcctgctgcagctcgtggatccagtcggtcaggtccttcagcacgcgcacgtaggtgttgtcgttgccgtactgcgcaccccagtcggtggagtcgtcggcgagcagtgcgatctggcgtacgccggcgtcaatggtctgcatgtacttggccttgagttccttgaggtcctcctggtagtgctcctcggtgtcgaagcggaagtgcttgcccctagcctcgccgtcgttatggaacggcgcgagcgcgtaaacgaaacgcaccttcgacttgttgccggcctcggcctgcggcttgatctcgttctcgatctggtcttcggtgtacaggccgcgccagttgttgcggtgcagcggatcgtccttgggggcgtacacgtaggtgttcatcttgtagtagccgccccaggtcatcaggttcacgcggtccttggtgctccacgggctgccgtaatagccctcgatgaagccgcgggacttgacgtcggcccagtcgctgaaggtcaggttgctgacggcgcggcccggcagctgctggaagatctggtacagggtagtcaggccgtagaacgcggaatcggtgtcgcggccgagcacgaggatcgtgtcgggcgtcttcgcgttgccctgacggacggcaagtacataggagtcgttcttggagaacgtgctgtcgtccaccttcagggtgccgtcggcgatcagctgcttggcgtacttgtcgaccacgccgttggatccgttgatgccgaccagcacgttgagctggtacgcggtttcgggcacggcgtcggccgcggtggtctcgatgcccttgagcttcagggcctcgttcagacgggccttggtggcggaatcgattcccggttccacgacggtgttcgccttgtcgcgcagaatcagactgccgtcgccatactcggtgttctgcggctgggggtagatcttgtactggcccgactgttgggtcgtgccggaatcggccgccgtgccgctgtcgctggccgccatggccggaaccgcgaacgccgcggtcatggcgatcgacgcgatggccgtcacgattttgcctagaatctcatgcgtggaattaccattcgctcgcatttgtttccttatctgttcttgtgatactgtgcaccgcccgcgcatatgcctcatcacatgaccaagcccacatcccggtgggcctgtcctcgtcgctgcggtatatctggcgtgcggcgaaacgattgcgttcccgcgggttttcgccagatgccgcgatccatatttcagcttctcgtggcagtcgtcatcgacgacgcgttctctcaaccgttccgattagtcatgctagttttactatcgaatcacgtcaaacgcgattggacggccggatttgccggtgaagtggcagtggagcggatgacgggaatcgaacccgcgtaatcagtttggaagactgaggctctaccattgagctacatccgcgaaaatgtcgcttttggcgacttgagctattatacacatcgccgacactttggcaactcccgtgtccatgcggaacgggaccgtcaaaacaggaccgtcggaacaggcgtcacaccatgagaccgatatcgccggtgctcagcctctccgtctcccctgatgccgtgcgcacgctgatcgaagcgtcatcgttgagcgataccaccttgccggcgatcgtccggccgtcgatgagctgcgcgtcgatctgccgccccatcatccagcagacgtggtgcatctcggagcgcaaccgggaactctggatgagcggcatctgcacgaacgcctccagacgggtgcgcagtgaagcgaccaggcgcgccgcgatcatgtcaatcagttccgcggtcggcggcagcggtgcgacgtgcatccgcagcgacgtggattccggcgtcggcaaacgatccgcgggcaccgacaggttgacgcctacgctgaagatcacggcgacgtcaccgtgccggtcgggcggcgaggcgacctgggtgaacgtgctgccaagcttgagtccatggcagtaaatgtcgttcggccatttgagatggaacccgcattcggggtcgaacgggaccgcgccgcactcgtccagggttccttcgatggcgtccagagtggccaggccggcaatcatcgacatccagccgttgaccgcgtcatcggtcgccaccgattcggggatggtcacgatgaacgatatggcgaacgagtgcccgggaacgcatgcccacggccggccgagccgtcctcgggcgtcgtccatggcaccggcggcgaccacggtgatggcgatgccgccgtcatcgttgcgcgcgaacctcccccgctcgatgagtcggcgtgccttcgcatgggtggaatcgatgcgttcataggcggccacctcgtccgccgctttcgcagtccggtcaagtcgcggcgctgcgactttgtgtaaggcaatcatgatgatactgtacgccggaagatatggcagcgtcaaaacggatgtatcgtcacacaagcgtcggccgcatacgatacgacccgctggtgcgtctcccgggagtcttgcccgagcctcgcaccagcgggccgtaaacagccgacgagcccgatgtcggattctgccccgacatggatggcgtacactcgccagccgatgcctgcggacgccccaacgaatatccgcctgcatacatacctatgacgcacgcttatttcgagcgtcgtcttcaaagagtctgagaactgtccgtatagcggcgtcatgactgccgaaaaccgccgtcacacggtcaacatggcgacggccgaggcgataccgccatcatggctcagcgagacatgccaccgaaaaaccaaggaaaccgatgcgctcgacgccgcagccggctcggaacccgtgctcaccggagtcacgatcggcacccgcatgaccgcaggccccatcctgaccaacccgggcgcgcccgacatttcatcggagtttctggaggctgcggggggcagcgacgcacgcagcttccgctcgacgtccggccgcaacgcaacgcacggtcggccgcgcgaatcatccacgatttcaatgccgttccacgggaaattctcgatggtatacgggttcggcatgtcgccgagcgcgtcgcaccaggctttcagcaccgcttccttgccggcccacttcgccgccaagtgggtggactcgtcatcgttcttgcgtctggcccgctcgccggcctgcctcacctcgcgcacagagaacagccctcgcatgcgcgaacccggttccgcaagctgttcggcgaacgccgagacatcgacgacatcgtgcccgagaccgagaaccgacataccgcgccacctttccgagagacctgttccagtgtatgacgggtccgggccgctttgcgtccttaagtgcgcgccgaaacgacaagtgtgcgcacttaaggacgcaaatgggctggtttgcgtcgctatgtgcgcggacacgtcgtttcggcgcgcacttacgaacgcaaaatgggcccacacgcggaaacgtgcgggcccatcattcagcagtcagacgtgactcggcagatcaggcctcgaagaagccagactgaccgaggcgggcgtcaggctgagccgtcaaaacggggagtccagtgaactccccgtaggcgaagcgagcgggcgcgctacctgcgcccgcgagggaatcctgacgaacgactcggcagatcaggcttcgaagaagccagactgaccgaggcgggcgtcaggattcaacagcatggccttttcgacttcgtggccgttgtaacgattgccgtcggcgagcttggtgccgtcctcgcggaagcgacggttgtcgatcggctcgtagagcgccgcgcgacccatcatgccttcctcaaggtgacgctggccggcagccagacgggcgttcgcacgctcgcgccaggcgttcagcgcgtcctcacccgcggtgtgtgccacggccgcctcgaaggcacccgggttcacgatcgcggcgaaaccgctcacgtggccgaagccgagcgaggtggcgaggccggccttgacgcggccgacgtgcagcggcttggtgagccacaccatgtggtcgtcgcgctccagcttcgggtccacgcagtcgagcgaggcgttggccgggatcacgccggacttgaacagctgtgtcaggccgttgacctggaagatgcaggcgccgcccttcgcgtggccggtgagcgtcttctgggagatcacgaacagcgggttgccgttcgtgcggccgatggcgtgcgccagcgtgttgtgcagctcggactcgttcgggtcgttcgcgttggtggacgtgtcgtgcttggagaccacggcgatgtcgtccggggtgacgccgagcgcggccagatcgtgcacgagcttcgagtcgcggccgccgaggccagccgccagggcgccgaggcccggggccgggatcgaggtgtgcgcgccatccgcgtacgagtggatgaagccgactacgccggcgaccggcagacccatgcgaagcgcgatgtcaccgcgcgtcagcaggatcgtgccgccgccctgggactccaggaagccgccgcggcgacggtcgttcgcacgcgagaagaagcgcgcgtcgatgcccttcgcgtacatctcctccgagttggcggtggcgttcatgttgccgaagccgatcacggattccacgccgatgtcgtcaatcgcgccggtgaccacgaagtcggccttgccgagggcgatcttgtcggcgccctcctccagcgacaccgcggcggtggcgcaggcggagaccggctggatcatgttgccgtagccgccgacgtaggactgcatcacatgcgcggccaccacgttcggcagggcctcctgcaggatatcggtcgggatctcatggttgaggaagcggtcaaggtacagcttgcgcatcgacatcatgccgccgaagccggttccctgcgtgctcgccaccatcgagggatggatggcctgcagcacctcggtcggcgtgaagccggcggacaggtaggcgtccacggtggtgacgatgttccacagcgcgatcttgtcgacgtcgccgaccatcgaggccgggatgccccacttgagcgggtcgaagcccttcgggaactggccgccgaccgtgcgcgtcatcgtggcgcgacgcggcacgcgaatcatcgaaccggcgtgacgggtgacgttccattcgcccgactccgggtcggccgcgatggaggtgtgcgcctcgtccatcttgacgtattccttggcgatgtcctcggtgggcacggagaaggtgacatcgtggtcgaggaagacctcggtctcctcttcgtcggcgccgtccttgtagtcgttgcccatgccttcatcgaacggacggatgccggagcgggccacgacctcgtcatggtagcgttcggcgatgtcctcttcgggcacgaggttgccgtcggtgtcgtaccaacccggcttcggactgtcctgccattcgaccaaacccatgttccacgcgagttcgagcaccgcgccggcggacaggtcgacgctgccgtcggagtggattccgagctccgcctcgaagcgggtgcggccggagccccacgggcccagctcgccgatggagacgatgacgatctcgtcctcgggcttggcggtgacgttctgccagtcggccaggtcgaccggcgcctgctgcggcacgtgcgggctgggcagcgccttgatgctcaggccggatgcggcggtcttcgcggaggtggagtcgtcgtccgactgctgtgcggaagccgcggccttctctgcgtcggccatcgcctcggcgcgcagcgccttgatatcgatcggggcgttgccgagcccaccggtcaggtccacgtcgagcggatgctcgactgcttccgcgcgggattccgcggtgcacaggtcgagcagcttcacggcgatctgttcggtggagtacgtgtggatgccgtggcgttcgacgacctcgaccagcgggtcgttgccgcccatcaggccggtaccgcgcacccagccaatcttcgggtgggcgaaggtgacacgagacgaccataccttttcggcatgggcgcggttgacgatcgcgtcaaacgcgctcttgacctcgccgtacgcgccgtcgccgccaaagatgccgcggttcggggagccgggcagcaccacatgcagcttgtgctgcacgtcggtgtcggcgccgatggcggataggccggcgatcgcgcgttccacgccccacagcatcagtcgcgcctgggactcgaacagttcgccggagtcggtcaacgtgccgtgcaccggcggggcggcgaacgggaagaacagcgtcggctcgtatgcgggcttcaggatcgtggtggtcgcgccggaggtcttcttctgcacgttgccgatccactggaccagttcgtccacgtcgcggtagctggacaggttcgcgggaaccagccacagcttggcgccgcccaccgcgtgctcgcggtaggtttgcttcgcccacgccttgacggacggacggaagctgtgcgaggtggcgatgacggtcgcgccgccggccagcaggccgttgacgacctgcgcggcgatcgagttcggagccacgccggtcaccactgcgatgtcgttcgcgaagcgggatgcgtcaggcacgtcggcgaccgattcgagggcctcggtggcgatgcggtcgaaggtgtcggcgagctgtccatggctcttggacgcgaaccacttggcctggtcggcgacgtccttgccagcgccgacaaagctcagggactcgacagactggtcgccattgtagaacaggcgagccaggtcttcgcgcgcggatgcccagcggtcatcgaagaggatggccttgcgggagtcgaagcgcggctcgacctgcttgggccagtcggagccgagctcggcgtcgacggcggccacgacggtcgcgttctcgtcctcgccgggttcggcggtcggagccgtcacgcccagttcgttgagcacgtaacgggcggtggaggcgagcacgccgttggcaccggtgaccttctccgcgaaggcgtcgagcgccgcggaatccaccacggcaccgccggctgcgccgccggcgctcggcttggagacagccacgcccttggtctgcccgaccagggccaccgcatcgtcgatgagctgatcggcggcggccgcattggcggcggcgccggtgggcagcttggccagatcaccgccacgcgagctggcaccctcgcgggtgtcgagcagcagggccgcggtcacggcggcaacccagccttcgccgagctgccacacgttggtcacgcgttcgcggatgtgcgcgggcttgacgccggcggcaccgaacagcgcgcgcaggcggtcacggatcgcatcagacagtaccgggccgaacgccttgtagttcggggcgaccttgttgacgagctgtgcaagctgggtgagagtcgcctctgcggcgccatccacgctggccacacccagctcggagctgatatccatcagcagctggttgcggcgggacgacacgccattggtcagcgtgtcggtcgtgtcgttcgcgccgatttggtcgaggcggatctttgtggagtaagccatgagcacaccgatggcgtcggacgccttgaacggtaggtcgtcgaccgggccgctgacggcggaaccgagttcggcgacggcggaaccgacctgagcggcggacggcgcggcgacgactgccggagccgcggcgggcgcggcggcagcgggcgcagccggagccggagcagcagcgggcgccgcggtctcggtctcctccggctcatcgtccggcaccagcgaatcagagtcggtcatgtacacacggccctcatcgcggccgacgttgtacacggtcacgtcacaacccgagaaatcgggcagccgcagcgtcttggagccgagattggcaagcgtcggcgagttgccgagaccaacctccacgtactcctccacgccgagaccaccgcggttggcggggttgaacagcagcgcctgggtctcgatccagcgcacgggggacgcgaactgccacgacagcagttcggtgagcagcagacggccgagcttctggtcgtcggcggcgtaggagtcccacactgccgggtcgtccagagcggccttgatgcgctcagacggcacgacttcgaggatcttggcggcgaattccttcgtcatctcgaacggggacgccaccagattcgggatgtagcggtcgaccagacggccacggtagtcgatgtactgcggcagtagcgcgtcgagcttgtcgcggaactccggcacgcccttgcgaagcaacgtggagtggaacggaacgtcgatgcccggcaccagcatgaacggcggcttgccgccatattccttggcgcggcgggacgcgtcggcctgcaggtacttcaggccggcgatcgtgccggcgatcgcgtactgctggccggcgaggttgtagttcacgatctccagaaactcgccggacgccttggcgacggactcgacgtattccttgacgtgcgcgtcgttgacgccgaactggttcggacgcagcgcgcccatgcggtagttcgagcggccctgggcgtcgcgctcgatcaggtggtgcatggtggagccgcggtggaacaccagttccagctcggtttccagcgggatgatgtcggcgaacgcggacagcgcgttgtactcgccgagcgagtggcccgcgaagtacgccggccagatgtcggagccggcctcgcgcagacgcgcggtctgggcgtaggccaccgtggcgagcgccacctgcgtgaactgggtgaggttgagcaggccgtccgggtgacggtaggtcacgccgttggcggtgagctccttcgggttgtcgcgcacgaccgcgaggatcgagaagcccagcttggagcgggtcagcttgtcggcgcgctcccacacgctgcgggcggcgggtgacttggcacgctcgtcaagcaccatgccctgtttctggatgccctggccggggtagacgaacgcggacttcggcgcgcggaccagcgcagtgccgcgcgagaccagctgaccgtcgatgcggcaggtcacttcgaatgccatgccgccgtgctcgaccttgccgacgcgctcgatggagatctccaccttgtcgtcgagctgcaccatgccgtacatgttgtaggtccagcctgcgatctcgtagtgagcacccttgtcgtccagcgcctggacggcgtgctgggcggtggcggacagccacatgccgtgcaccagcggggcggcgagcccggagatgcgggcgccgcgcgtggaggtgtggatcggattgaagtcgccggaggtacgcgcgaatgcagtcatgtcatcgggcgcggtgacggtaacgcggcgcagcagacggcgaggtgtggcctgcaccgtggctgcggcggagccgtcctcatgcttggcttcgagggcgccaccgtattcgggggcgtcggccggcagcgcgtcggagtagacgcggccgcgaatggcgaagcgctcggtctcgcgggcgagcacggtgccgtcggcggcggtgtgcagcacgtggatggtcacgacgcggccggacgcggactcgaagtagtcctcggcccagctggtgagcgtgatggtctcgtcgacgcgcttcagcagctcgtcctcggtctcctcaagctcgatgaggtggtcgagatgcaccgcgttgagcagtccctcgatgaccgggtagcccttgacgtacacggagccgagtgccgcgtagatcgccggccatgccgggccgaccagcgcgtcgggggcgatgcgcgagggcgcgaggtcctgcggcagcgcgccgccggtggccgcctcgtggtcgtagccgaggttggcggacagcgtgtaggtggccgacgcggtgccgaacgggtaagcggccttgtcgtcggacggggtgatcttcggcatgtcggtcagcttgtcgccggtgatggcggtgttgccgatgcctgcggtggcggcgagcatcgcgtagacgttaccgaccaggcgctcgcggttgacgaccggcagcaggccggtttcggtgccgcgcagcgtcaacgggatgacgatgtcgcgcacggcgtgcttggagacgccaccgtccggatcgttgtcccagtacgtgtcgagatggatgtcgaggtcgtattcctcgccctgctcggaagcgccgcggtcgatgatctcatagttggcgtcgccgacctgcgtgccgtatgccgggttcgtggtcaggtggccgacccaggagatgttcgggcaggtgcggatgaacacttcggcgctctcggcgccgccgagctcgctgtaggcgtcggtggaggcaccggactgcagttcgcgggtgcgctccagggccgcggcctcgaaacggccgaggatgtgggcgacgggctcgtcgacggtggtgatgccggccacggagatcgggccgggaatcacgcgcacggaatcggcggaatagcgggcgtcctcggactgccacagctgatcctggccccaccagcgcagcaggtcattgtcgatgaccggcacgaacggcatgggcttgggatattcgctcacgagtaccgggaaccaagccgcatcggccggggtcacgtggatttcggcaacctgcgggtaggcggcttccagcttggcgatggcggccttcggatcggaggcgacatcgtccacgccggcgaacagcgaggtgaactcgccggattcctgaccgcacacacgggcttcgatgcgctgcagcaggtgcaggaagcgcagcgaatacgtcgggtcgaccacggggaacaccaggtcgacgaaacgctcggcccactcgacgtaggtcatcgaggcgaggtcgccgaagtacggcttggcggtggcgtcgagcgccttgatgatctcgtcgcggcggctttccagctcttcggggtgcttcatgacgcgcaccaacagacggccgcaggcggcggaggcgttctcgacctcgtagatgtcggcgtgaaggtggctcaggccggaggagactccgccgaccgacttgccggacggcacccacttctcgccggcgggcgcgaacgggtcggcgtcggccgacgtgtcggtgatgccgggcgtcttgacgagcagctgcttgaccgcggggctggtgtgggcctccttggcggtcatgacggcggtgccgatgagcacgccgtcgaccggcatgtcgggcaggtcgtaggcgcgcgcccactggccggagatgtagtcggccgcgcgctccggcgtaccgatgccgccgccggcgaccagcacgaggttgctgcatgcgcgcacctcggcgtaggtggaggtcagcaggtcgtccagcgactcccaggagtggtggccgccggccgaaccgccttcgacctgcatcaggatcgtcgtgggggccacggccttggcaatcgccacgacctggcggatctgcgcgacggtgccgggcttgaagccgacgtagggcagaccgtccgcctgcagggaggcgacgagcgccttggcctcgtcgagctcggggatgccggccgagacgatcacgccgtcgatcggcgtgccggacgcgcgcttcttcggcacgatgccggaggggccgaactgcaggttccaaaggtagcgatccatgaacatcgcgttgaattcgaccgtgcggccttcttcgagcaggttctccagctcggcgacatgacggtcgaacacgtcggcggtcacctggccgccgccgccgatctcggcccaatagccggcgttcgcggccgcggccacgatctcgggatccacggtggtcggggtcatgccaggcagcagcaccggcggcttgccggtcaggtcggtgaacttggtgcggatcttgtcgccggcgggagtgtgcaacaccttcggcgcgaacgtcttccagttctgggtgcggacgggctcgtcctccatggtggacagcgcggaacgctcggccatcgtggcggcttcgaccacgccgacgccggtgccctggatcaggttgccgatgagcttgccgagcgtgttgcccgggccgaagtcgacgatccacagcttggacggatcgcaggattccagcatcgccttgacgcgggccgcccaatcgacgtggttgagcagcacttcggcggccagctcgcgcgtacgggtctccttgaagccgcaggcgtgcgcccaggccacggcctgctcgacggcatcggccatcagcggcgagtggaacggcagcgtgacctccaggtattcgaggacgggcccgaacaccgcgccgccgcggaccttctcgtcacgcagtgtctgctggcgcttgtgctccttgccggcctcgacctcgaaggcggcaaggtcctccgggtagccggagagcacgtggttgttgctggagttggtgacggcgatgctgatcgggccgcgcgggttcggcacgcgggatgcgagcacctcgacctggcgcttggtggcgccgcgcacagacagcatcggagtggcgccggcgtgctgcgcggtgagcgcgagctcgcgcgccttgcgggtgccggccacgccgatcagctcggcgatggccaggatctcgtcgatctgctggcctgcggcctcgatggagccggccttgcggatggcgttgaccatgtgcgcgccgagcacgccctgcgaatggccgagcacggcgacgggggcggtgttcgccacgtcaaggccgagaccggcggcgtcgatcagcgcgccgagctgggtgagcgcgatgccttcgacgctgacggtcgccgcggcggcggcaccgagccgtgccgggttcggcttgaagccgaacaggtcgatggcgcgtccggtggtggcaagcaggtcggcggccacgggggcgagcatcgtgttcgccgcggcgacatggccgcgcagcgtggcttcgagcgccggatcattggtcaggtcagcgagcgcaaccggccagggtgtggactgtccgccgaaagcgagcgcatgaggttcgccgttgagccgactgagaaagaaattggggtctgacatgggttggtgttccttcttttatttggacattgtgcggagccgccattgccggtatcggctcaaaatctgttgtgccgcggagtggccgccgcggcgggatggactacagcggctggttgccgtgatgcttggtggtgcggcgcacgcgcttcttgtcggcgagcagtcgcagcgattcggcgatggcctgacgggtctgctcgggatcgatcatcgcgtcgatctcgcccatttcgagcgacaggttcgcgttgacggtggtgcgctcgtattcggcggcgagcttggcccgcagcgcgtcgacgtcctcgccggcctccttggccttgacgaagtccttgcggtggatgatgttcaccgcgccggtggcgccgagcaccgcgatctgcgagctgggccacgcgaagttcatgtccgcgccgatcgccttggatcccatcacgatgtacgcgccgccgaacgccttgcgcagcacgacggtgaccatcggcacctgcgcgttcgcgtaagcgtagatcaccttggcgccgcggcggatgatgccggcgtgctcctgatcggcgcccggcttgtatccgggggtgtccacgagcgtgatgaccggcaggttgaacgagtcgcacagacgcacgaaccgcgccaccttttcggaggcgtccacgtcgaggatgccggcgcgaacgttcggctggttggcgaccacgccgatcggccggccgtcgatgcaggcgaatccgacgacggcggacgtggcgaacagctcgtgcacctgcacgaattcgccgtagtcgacgatgcagcggatcacgtcgagcacgtcatacggctggcggtcgttgtccggcacgatgtcggtaaggcgtttcgcggtctcgcggtccgcgcgagtcgccgcataggcgtacatcgggggctgggcgtcgctgttcgacggcaggtaggcaagcaccgtgcgcgcgtagtcgatcgcgtcggcctcgtcctcgccgaggtagtgcgcaacgccggatttcgtgctgtgcacgagtccgccgccgaggtcgttcatgctgatcgtctcaccggtggccgccttgacgacgtccgggccggtgacgaacatgtcggagttctccttggtcatgacgatcaggtcggtcagcgccgggcagtacacggcgccgccggcgcacggacccaggatcagcgagatctgcgggacgaagccgctggcgtcgcaggtcttgcggaagatgtggccgtactgcgtcagcgcggcgacgccttcctggatgcgggcgccgccggagtcgacgatcgcgacgatcggcaccttcaggtccagcgccatgtccatcaggtggcagatcttctcgccttcggcacgacccagcgtgcctcccctgacggagaagtcctgcgcgtagacggcgatcttgcggccgtacacgtcaccgaatccggtgatgacggccgaaccggccttgccgccgttgatgtcgccgccgcggaaccggccgatctcctcgaacgagccggtgtcgagcagcagtccgagccgctcgcgggcggtcatcttgcccttggcgtgctggcgggtgcgcgcgttggattcagcgtcacgcgcgagttccgccgcgcgtaccaccgctgcgcggatcggctgctcgccctgcgcctgtgcggcgccgtccgccgagacgtgcccaggttgtttcatgacctgtttcacggccggcgagttcatgatatcggtcatcacttgccctccttgccgctcttcgcggtgcttgcggacttgccgccgtcatccaccgcgccggacttgtcgcgcgccttggcaccgtcgacgtccatcgcgaccagcgtctcgccggcctcgacgccggtggcgggcgcaacgaagatcttcgcgaccgtgccgttgaccggcgcgtacacgtagttctccatcttcatcgactccagtaccaccagcaggtcgcccttggtgacggactggccttccgcgacgttgatgcgcgtgaccaccgcctgcatgggcgaggcgatgacgccggacttgccgtcgttgtgctccttcttctccgcgatggcgtgcagcccctggcctcgcagcggctgcgacgggcgcttggctccgcgcgaacgccccgctcccatgaggttgttgacgatgtcggtcggcacggtgagcttgacgcggcggtcgtcgacctcgatgacgaagctttcgctcgtcggggccttcgcgccggcgtcctggccttcgccgctgagcgacgccggctgtcccgagcgcacggtctgcggctcatggttgaggtacttgcgctccagccacttcgtgctcacgtcgaagagatgaccatgctcggcggtgaactcatcgtcgttgaagatctgcttgaacaggctgaccggggtcggcacgccctcgatcacgagttcgtcgagcgcgcggcgcacgcgggcgacagccgcctcacggctctgcgcggtgatcacgaccttgcccatcatcgaatcgaacttcggcgagaccgtgtctccctgctccacgccggtatcgatgcgcaggccggggccggacggccagacgatgcgctccagcgtgccggaggacggcgtcaggttcgtcgccggatcctcgctggtgatgcgcagctcgaagctgtggccgcgcggcgcgggggccggtgtcaggtggccgccgtcggcgatatcgatctgctcgcgcaccagatcaagcccgcacacctcctcgctgaccgtgtgctcgacctgcagacgcgggttgacctccaggaagtacaccttgcgatgcggggtcaccatgaactcgcacgtgcccagaccgatgtagtcgaccttgttgaacaggctgcgcgaatacgtctccagctggttgatgacctcgtccggcaggaacggagcgggggcctcctcgacgagcttctggttgcgccgctgcacagagcagtcacgcgtcgagtacacggtgaagtcgccgaaacggtcgcggccgcactgggtctccacgtggcgggccttgtcgatgaacttctcgatgaagtactcgtccaggtcgccgccctgcatcgcgtcatggttcatgtagaagcgacgcatctcgtcatcgtcgtgcacgacggtgatgcctcggccgccaccgccgtcggtgcgcttcatcatcaccgggtagccgtacgtgtgcgagaagtccagcagcgtgcgcagctcgcgcaccggctcgctgatgcccggcaccggcggcacctgcgcggacttcgccacgcgacgcgcggtgatcttgtcgccgaggtcgatcagcgcctgcggatgcggccccacccagatcgcgcccgctttctcgaccttgtcggcgaagctcggcacctcggagaggaatccgtagccggggtgcacggcgttcgcgccggaccggtgcaggatgccgatcaacaggtcctcgttgaggtatgtgctcgcgtatgtgtcacccgacagcaggtacgactcgtcggccagctggacgtactgggcgttgcggtcctgttcggagtacaccgccaccgtggaaatccccatctcccgggcggttctcaccacgcgcagcgcgatctcgccgcggttggcgacgagtatttttttgacgatatttcccatatattccactatcgccgtatgcgcgcgagcgcggagtcaagttttcgacaaaaacggcggcgatattttgtagagcgaagacaaacggccacgtaagttccggcaccgtaaccggcgaacatccacaaaaggccgtctcgacttttgtatgttcccgacaggccgtctaaggcgagggctttctatcattggcgacaacggagggacactcgccgtccgttctttcatcatcgagaggggttattcatgtccgaacgtactgtttccaccgcccagcgcggccgtatgctggcttcgaccatcggcaagccggtgctgttcgccgtcctcatgtggctcgcttcggcagctggtgagatttcgatccctggcaccccggtgccgatcacgctgcagaccttcgtcatgatgctggcaggtctgatgctcagctggcgtcaggcaggcagcgcggtggtgctgtatctggccgccggcgcggccgggctgccggtgttcgccggcggcgcctccaccgccgccctgttcggcccgagcgcgggcttcctgatcggcttcctgccggccgtaatcgtcaccgccctgctgcgcggcaaggcgcgtcttgactcggctccgcacgccgcgctgaccgccgtccgctacttcggcgcctcactggccggcaacctggtggtgctgtacctgttcggcatcacgattcagtccatggtcatgcatgttccgttcacgaccgtggcgattgcgtcgatgggcttcgtgatcggcgatgtcatcaaggccgtcgtcgcgtcgctcgcggcgaccggtctggccaagctgttctgattcgcgtcgctgttgtcgcagcgaacggttctcaatagcgtttgtgcgaggatttctaacattcccgcacaaacgctcatatggaagaagcccggaattccgggcttcttccatattttttgttcatttcggacggatgcaggctcacacctttcttattgagaaccgttcgctgcgactacagcggcaatacgccgacgtcggccgtgtgcacgacatggttttcgcccgcatcgtcacgcacgctcagcgacgcgtcggcgttcagcgccgtcgccgtaccggtcagcaccgaaccatcggtgaagcgcgcctcaacacgacgtcccagcgtccagcacacgcgggaggtctcctcgcgcagccgctcggcggcggcatgcgggtctgccacgaaaccgctcagtcgagaactcagcgaccgcacgatatgcgcggcgatcatatcacgcagtgtccgggcatcgggcagcccttgcacatgcagttgcagtgacgtggactgctccgtgggcaaccggtcggccggtatcgcgaggttgatgccgatgccgatcaccagcgccgcgctgtcatcgcgcccgggcagcggcaccatctcggtgaggatgccacccagcttgcgtccctggcagaacaggtcattcggccacttgagccgcagaccgcaatcttcactggccgccccacattcggcgagcgcgccccgcagcgcatccagcgcggcaaacccggcgatcaccgtcagccagccgtttacgctgccgtcggcgatcacgcccgccggcagcgtggcgatgtacgagcaggtcatcgattcgccgggagcactcacccatgtgcgttccagccggccgcggcccgcactctgcacatcagtggccaccacggccacaccggcacccccgtcggccggaggcgccatggtgccgtcgcgcagcatctgccgcgccagcgtattggtcgatgcggtttccaccaccgcaatcacattgtcagccacctcggtggtgcgtggcatgtttggaatgattccccttgctgtttccggcatgccttcagattatgcccgatatcgtcctacggcaaatgccggcaatggcgcgatcgccgccgttcaaggcgcatcggtagaataccgtgacatgaccacagctcacatcacggatcactccgccgccaccccggcccgcggcgggcgcggaggcagcggcggcaggtcacgacgcgccaccggcaccgccctcgcgcgtctcgcggccgtggcgcgatggacgctggccgtcgcggcctgcctgtggatcgccttgtgcgtggcggtggggccgctctactgggcagactcctcgatcgcggatttcggcgcgttgaactggttgtttgccgttgtcggattccttgtgccattcgccgccgtggtcgcgatgactcgctgggcgaacggcataccggtgttcggctggtccagcggcaagaacggcctgcatccacggcgcctgattccggcgggcgcacgtcgcgcggccgcgcggctcctggcatccgctcccggctcgtgggtcagccggaccggacggttcctcgcccgggtatgcgtacgtgccaccgaccggtggtggaaaatcgcactgatcctgttcatcggctggctttgggtgccgacgacgctgctgtccgcgttcggcgccgacatccgctctcaggctcgcgagttcagctgggcctggaaccaatggaccggcctggatcagccgtatatcggattcttctcattcgtgccgatggacatctatccgaccgcgcactacatatggccgtcgaatccgacgtacctgaccgatcagcacaacatcgtgctgacggtactgtatggtgccgtgctgtcggtctcccggtatttcaccgattccaacgacgtcggattcgtagtgctgtcatccgcgcagttcctgttcgccgcgttctgctgcgccgccaccgccaaccggttcttcaacctgccgtggctgccgcgccgcgccggcattgacttcacgcatcccgaacgcgggccgatggcactggtcatgcttgatttcgcgcatccggagcgcgggtacgcctcccccggcttcgcggcgcgggcatgtgccgggaacggacgcctgcccgaaggcgcctcgggatggttctcgcgtctggtgattatcctgttcttcctatgctgtccgctcgcggtgttctcgacgatctcgctgacgaaatcgcctctgttcgcattctcgttcgtgtgggcgttcggcgtgtggtacgagctgttccgtacgtggcgaggtaagggcgacaaggtggtcaggctgcgccgtcgcagccttatcgcattgatcctggcctgcgtggtgatgctggcgagcgcgaagtacgcttggtacatcatcgtgctgcagctggttcttgcgctgctttccgaccatcgccgctggaaggcgtacgtcgtcgcgttgctgctgccggtcatcgtgctgcatggcggcgtcgtgatgctgacccgcaccggtgcgatcatcagcggcgatccgatcgaaagccacggcgtccagctgcagcagatcgcccgcatcgccaagcgcaatccgggcagcataccgcagtccgccagggaggagatcgcgccgatcttcaatctcgatcagatggccgacgcctaccagccgcaggatgccgacccggtgaagtcgtccggcatccagtcgaagaaggtgagctaccgttggcggtcggtcacgcaggaggacatggcccggttcaatagcgcctggtggcagatcttcaaggccgatcccgtcaccgccatcgacgcgctgctggcgaagtgcttcggctatttcaacccgatggatcagccgtacgtgtcgatggattactacgtgaacagcgattatgtgacagaccagaccacgtggatcaaatactggtgcagcgagtggcggcagtccatcgccgatggcgcaaagcagttcggtgagattccggtgctgggatgggtggctcacggcaacctgtatgtgatgatgacgctgctgatcggcgcggccgaagtggtgcttcgccggtggcgcacactggtcatgcatctgccgctgctgctgctcatgggcgtgatgatcaccgcgcccgcgaacaatttcgagcggcatatgctgccggtggcgttcgtgttcggattcgtggtgctcacgttctggcgggagtcgcagcgggcgcggcgcaacgcggacatccggtgacgactggtgacgcttgcagacggttcggctatgctggacggtatgaccgatttcgacacggagcatggttccgttgactttcttgacctgctgagcagtggttccgctcaggatgacgccgattcccgcctggaatcggtggcgttcgcgtgtctggtcaatgggttggcggatgagcgtgccgcggcgattctggggattcttgatttttcggatgattttctgtgctttgccatcggcggcaagccgttgcacacgatggcgggcacaagggccgcgatccgcaggaccgtgcatgatctgggcggcgggccgtgcgtgacggggacgacgaacggtctgtgcgtggcgctgatcatgccgcgtgcggcggcgacgcccgatgtaacgtgtaccaatacgctgtcggcgttctcgacgaaggcgccggtgtgcctgggacctttgcgccgcggtgtcgagggtgcctgccgcacggtgcaggcggtccgttcggcgattgcggcggctcccgcattgccgcaggttccgcgcccgatgcgtgccgatgacgtgctgcctgagcgggcgctgctgggagatcaggatgccgtggacgagctggtgaatacggtatatgccagtctgcagacggcggggccggacgatcctactttggagaccgtgtccacgttcctgcgcaacggcggctcgttggagaccacggccaaggaattgagcgtacacccgaacacggtgcggtaccgtttgaagcgggccgccgaaaccactggctgggacgccgccgacgcgcgcgaagcctacgtgttacgcaccgccatcgccctgggccgcatgcataccgcctgagcgcaccgcgactgaggagcaacgccggcaacgcgccaccacacaacacacccctgaacacgccgcgatgcgcgcggtaccaagacgcaccgaaggaagcggtacaaaggtaccgcgactgagacgcaacgcaggtaacgcgccatcgcggtgtgttcaggcgtgttcagaagaggcgaagggaatcatcttccctacccttcatctcgtcataatcgaggatgaggcattcgaaaccgcggtcctgggcgaggacgcgggcctgaggggtgatggtctgggcggcgaagatgccgtggacgggggcgaggagggggtcgcggttgaggagctcgcagtagcgggtgagctgctcgacgccgtcgatgccgccgtggcgtttgatctcgatggcgacgtgctcgccgtcggcgttgagggccatgatgtcgacggggccgattgcggtggggtattcgcggcggatgagcttggagccggggccgatgcggtcgatctgttcggagagataacgctggaggtggtcttcgacgccgtccttgatgaggcctggatcgatgccgaggtcataggtggtgtcggagtagacgtggtacagggagacttccaagacgtcgctggtcttgtcggcgcagacgcgaaggatatgctcgggggcaggcccgtccgcggcctcaacagagtccggggggacgtccttcaaagtgcagggcgcagccatccagttgagcggcttgtatgagccgagttcggagaagatcagcagactgttgtcggcctttatgagcagaacgcgcttcgcgggaggaagcgacgcactgaggcgaccggaatattcagcagagcaatcagcaacaataacgcgcacgtcacaccagtgtacagtacgcgcggaagggagggagcgcctctcggaccagtaacaggcacgaaccgtacggccgcgccgacagcgcgggcgtatcaaacgccaaaatacgggttgaaatcgccgctttgagcaattccccgtgcgaaatcgccgtttcaggatccaaaaacggcgatttcgcacggggaattgcggatttcggctatttcaacccgtattttggcgggaatggtggagtgcgccgggcattgacggagagggggataacaccgagtagataacacaaaaagggcgccgcctgcgggatgcagacgacgcccagtgcgagcgcaacggcacagccgctgccgtgccgaagagctcgctattcgataccgggtccttcagtgcggaccacgtcacggccgcgttcgacggcaaccgtgagcttgttgaaatcgaaggagatgaatccgtcactgacctcgaacgcatggcgctcacctgcgggatccacgaccgaaaccgtgcctcccttgatcaccgtgagcaccggctcgtggtcggccagaatacccatctcgccttcggaggcggggatggtgacggacttcgccgtgccgtgccacaccgggtgatcggcggcgacgatgttgacctgcatcagggcctttgacgattcagccatcactcaccaagttccttctgcagatcgtgccacttcttttcgaggtcatcgataccgccgatgccggagaacgcctgctccgggacgtcgtcgtaaacgccgtcgcagatgcgggtgaaggcctcgatggtctcgtcggctggcacgtaggagcccggacgaccggtgaatttctcggccacgtagaagttctggccgaggaactgctcgatgcggcgggcgcggttgacggtggtcttgtcctcttccgaaagctcgtcgataccaatcagggcgatgatgtcctgcagctccttgttacgctgcagaatggccttgacgcggttggcgcagtcgtagtgggcctggccgacgtaacgcggatcaaggattcgcgaggtggagctcagcgggtcgacggccgggtagatgcccttggatgcgatgtcacgagaaagctcggtggtcgcgtccaggtgggcgaaagtcgtcgccggggccgggtcggtgtaatcgtcggcgggcacgtagatggcctgcagcgaggtgatggagtggcctcgggtcgaggtgatgcgctcctggagggagcccatctcgtcggccaggttcggctggtaacccacggcggagggcatgcggcccagcagcgtggagacctcggagccggcctgcgtgaagcggaagatgttgtcgatgaacaacagcacgtcctggttctgcacgtcgcggaagtactcggccatggtcagtgcggtcagcgggacgcgcagacgggtgcccggctgctcatccatctggccgaagaccagtgcggtcttctccagaacgccggcctcgcccatctcgccgatgaggtcgttgccctcacgggtacgctcgccgacgccggcgaacacggacacgccgccgtggttctgggcgacgcgctggatcatctcctggatcagcacggtcttgccgacgcctgcaccaccgaacagaccgatcttgccgccctgcacgtacggggtcagcagatcgatgaccttgatgccggtttcgaacatctgggtcttggactccagctggtcgaatgccggcggcttgcggtggatgggccagcgttcggtgaccttgatggtctcgtcggccttcttgttcagcacgtgaccggtcacgtcgaacacgtggcccagggtcacgtcgccgacgggcacggaaatcgagctgccggtgtcgtgcaccgaagcgccgcggacgaggccgtcggtgggcttcagggccacggcgcgcacggtggagtcgccaaggtgctgctcgacctcaagcgtgatcgtgtgcgcggtctcgccttcctcgtgagcgccggtgttggtcagctcgacggtcagggcgttgtagatatcgggcaggtggcccaccgggaattcgacgtcgataaccgaaccctggatacgcgtcacacgtccattgatcggctctgcagccgtctcgggagccgctgtggtctgattgtcagccatatgcgttcctactcttcctttgtgttcagcgcgtcggcgctgccgatgatttcggtaagttcctgggtgatggacgcctgacgggaggcgttcatcttacgggtcagcgagtcgatcaggttacgcgcgttctccgtcgccgtgtgcatggcgttctgcctgctcgcggtctcggacgcggccgcctccagcaggcattcgtgaatacgcgactggatgtacttcggcaggatggcatccatcaccttgtccaggctgggctcgaagcggtacaacgggcgcaccttggagctagcggcgttgtcgccctcgctctcgcgcgacatgcccgggccggattcgaccttggcctcgaccacttcgacgggaagcatacgcagcacgcgcaccttctgcaccaccatgttgatgaactcggtgtagacgatgtagagctcggagaccccgccctggctggccggcttcatgtaggcggtcatcagtgcgttggagatggcctcggcgatttcaacgcccggcttgtcggtatccccctcccacgtgtcggcgattgcgcggttgcggtacttgtagtacgtcacgccgcgccggccatacacgtagagttccggctgcttgccggcgtcgtcgagtcgcgtgagcagttcctcggtctcacggatgatcgacgaggtgtatgcgccggccatgccacgatccgccgtcaaggcgaggacggcaaccttggggttgtcctcctccttcttgacaatcggatgcgtgatacgggtgtgggctaccacagcctgaacggcatcgaaaatcgcatcggcgtacggcttcgcgttcagggccacgtcacgggccttggcgatatgcgaagacgcgatcatctcctgggcgttgaaaatcttctccagcgatcccgtagaggcgatcctgcccttcaatgcgagttgcgatcccatgggctacttcttttctccagccatcgggtgcttggtcggatcgtgcgcgggcttgtcggccttggcgatgatcttctcctgctccacgggcacaggcttgcgcgtcgaggacttcttcacgaccagcggcttgccggccttggtcacgtacgtctcgcggaacgcttcgacggcctcgtccaaggcggcttcggtgtcaggcgtgaagttctcggtctcacggatggtcttgaggatgtcggtgctgtgctccaggtaatcgagcagtgcgtgctcgaacggcagcacgtcgcccagcggcagatcatccatcttgccatgggtgccggcccacacggagacaacttcctgttccatcgaatacggcgagaactgcggctgcttgagcagctcggtcaggtgcgagccacggttcagctggttcttggacgcggcgtccagatcagacgcgaacatcgcgaaggattccagcgaacggtactgcgccagcgagatcttcagcgtgccggagaccttcttcagggccttggtctgtgcggcgccaccgactcgggagaccgagatgccgacgtccacggcgggacgctggttggcgttgaacagatcggactgcaggaagatctggccgtcggtgatggagatcacgttggtcgggatgtacgcggacacgtcgttcgccttggtctcgacgatcggcaggccggtcatggaaccgccgcccagatcgtcggagaccttcgcgcagcgttcgagcagacgcgaatgcaggtagaagacgtcgccagggtacgcttcacgccccggcgggcggcgcagcagcagcgagatcgaacggtaggcttcggcctgcttcgacaggtcgtcgaagacgatgagtacgtgcttgccgtggtacatccagtgctggccgatggccgagccggtgtacggcgcgatgtacttgaagcctgcggaatcggaagccggggaggccacgatggtggtgtactccatggcaccggcctcttcgaggctctggcgcacggatgcgatggtcgaacccttctgaccgatggccacgtagatgcagcgcacctgcttcttcgggtcgcccgtctcccagttcttcttctggttgatgatggtgtcgatcgcgattgcggtcttgccggtctggcggtctccgatgatgagctgacgctggccgcggccgatcggcgtcatcgcgtcgatggccttcaggccggtggacagcggttcgtcgacgggatgacggtgcataacgtcaggagcctgggcttcgaggattcgacgcccttcaatgcccttgatttcacccagaccatcgatcgggttgcccagcgggtccacggtgcggccgagatagccgtcgccgacgggcacggagagcacttcgccggtgcgtcggacctcctggccttcctcgatgcctgcgaaatcgccgaggataaccacgccgatctcacgggcgtcaagattgaacgccaggccgagcgtaccgtcctcgaaggtcagcagctcgttggccatgcaaccaggcagtcccgtcacgtgcgcaatgccgtcgccggccgtcgcgacatagcccacttcctgggtgggggtgtcactcggcttgtacgactcgacgaaatcatcgagcgccttgcgtatcgtggcgggatcaatggtaagttctgccatgatcactccttattgttggaaaatttcatgtcgggctccgtcgccgcgtgtggcgcggcccggaaccgtatcgtcaggctttcgcctttaccgtgcggtgcagctgctggagctgggcgaccacggtgttgtccgtgacctcgtcgccgacctggatgcgcatgccgccgaggaccgtggggtcgacgaccgagttgatgtgcaccggatggtcgagcttcgcggaatatacgtcggtcagtcgcttgatctggtcgatgttcagcggcgacgcggtggtcacggtaatcatcgactcgcccatgtggcgcgagaacttgttgatcagccactggatggtctccagatagcgccggttgcgcgggttgcacgcggcgtgttccgccagccggagcgtgacctcgttgaactcggtcttgcccagcacggcgttcagcagatcgatgcgcgccttggcgggtacgctgtcgtcattgagcttcgaacgcagaaccggcaggttgagcagcgcggaatgcagctcggccagttccacggacacgcgcagggtgacgcccgcggcatccgcgtagtacatcatggcgtcaacgccgaagtcttcgacggcgttggcgatgtgcgcggcacggctccatttgcgaccgaccagatcgctcatgatctccagggtcatgggatgggcctgggcaccgatgagctccttgagcacgccgatcttgtcgtcgaccggacgtgacggatcggtgagagcgcgttcgagctgcacggtgtggtcaagcacgttggtgatcgtgaacagttcgttgccgatacgccatgcgtccttgccggtcgagcgcagcttgggcgccaactcgtcacgcgaaacgcgatccgagatgcgggatgcctctcctcgcattggtcacctccctttccggaacgccggaatcacttcttgtcgttcgtgtccaggtcgtcgatcatcttgtcgatcatcgaggactgcacgtcgtcgctttcaagcttggcaccgagaatcttgccggccagggccgtggcaagagtaccgacttcgcccttgagggagaccagcgcctgctgctgctgcgactcgatagagcgctgtgcgttggcggtgatctgggcggcgtcggactccgcgcgggagcgtgcgtcggcgatgatgtgggaagcttcggcacgggcgtcgtcacgaatcttggaggcttcgacgcgagcggtgctcagctgggcctcgtacttgctcttggcggcgtcggcatccttcttggactgctctgccttggcgatgttgccttcgatcttcgccgcacgctcatcgaagatggcgttgaatttcggcatgaagaacttgtggaagaacagcgcgacgatgacaaggatgatcagggaccacacgatgtcgtagacctgcggaatgaacagcttgaggccgtcacttgcggctattgtcatcatgaagccctcctttcaatgtcgaataaacgtgtgaatcgtcgcctgtcgtctcacttaacgatcagggcggccacgaagccgagcagacccagcacctcgaccagtgcgaggccgatgaacatgatcatctggatcttgccgctcacctcgggctgacgggcggtggactccatcgccttgccgaacaggatgcccaggccgaggccggggccgagggtcgcgaggccgtagccgatgacggaaaggctgccggtgacctgagcgagagtaatgatgtccatttctgtttcctttctaacgtaaccgttaaaaaaacttggttaatttcttcagttgtctcgggaattgcaaagtattcgtatcgtccgtggtgagtctcacgcgggtgcggctcattcttccgggtagctcatgctgatgtacaccgtcgagaggatggcgaacacgtaggcctgcaggaaggcgacgaacgcttcgaacagggtgagcaccaaaccgaagacgaaccacagcgcgccgacggggatgccggcaagcttattggtcgcgtcgatgacccagtactgtgcaaacgccaggcaggatgccacgagcaagtgcccggagatcatgttggcgaacagacggatggtcagcgatgcggggcggatcagcaccagctcgcacagctggatcggcgccagcaggatgtacaccggccacggcactcccttggggaagcactcgtcgcggatgtagccccacaggcccttctcgcgtgctgcggtgatccagtactggatgagcacccagaccgcgaacaccagcggcatgaccactgtggcggtggccgccatgttcatgccggggatgatgccgcacaggttgaacacaaagatcgtgaagaacaacgtcgaaatcatcggcacgtagcgcttgccgcgcagctcgcccatgacctgatatacgacgctgtcgcgcacgaagtcgatgcccatctcgaccacgccttgccagcggccggggatgagcttggcgcgcttcgccgtgataccgagcaccacgagaagcaccacggtcgccacgatgcggatcaatatgatgcgattgatcgcgaagggggttccctggaacaggatctcgggaggaagaaaatcattgaccgttggcagttcgggaccgctgtcggccgccaatagtgcgcccgtaccgaccgcatctaccatatcgcgcctcctgctctcattatcagctgtcagtttagcccaacggttgaggcgaatgtgacgtttggatatcgtccgtccagccgttatcgaagctgcccgggcataagaccgaccaaccggagttcctgcccagacattccgctccgaatgactaagtgattatcctatgaccaccttggacaacacgcaacatgccttatttttcaagggctgcacggcgtttcttctccaaatttgtgagcgttaacatattggtcattgtctcattatttggacggttttttaaacaccgctcataaggcatggacaaaagaggcggtattccacctattgagcacggcgatggccctcttttgtacgctatgtggacaccaaaccgtgctaatgcaacaaatctcgaatctccgcccaattacagcgggattccgaggtcatctgcaccctccagatccgaaagaccatcaacgggagccgaccgggatggtcccagacccccgtcaaacgaccgcagcgcaggcgagaaccatcattcgccacgtatcacgccgtagtcgtcatggacgaacggtgagaaatcgtccttgcgcgggccggcgggcgcgtggcggaaacgatcgatgccaagccggcgctccgcccgcaatccgggcacttcggtgagatcgtacggcgtggtctgatacacccagttcagccaattgcgccacagcagattcgcgtgcgatcgccatgcgaacaacggctcaaggtgcggatcgtcatgcgggaagtagttgtgcgggaacgggacgttgctcatccccttcgccatgtcgcgctcgtactcctcctggagcgtcgtcttgccgtactcccaatggccgagagcgaacacttcggagaaatcgcgagtggcgatcaggccaggcccggactgcggaccccaagtgagcacttgcaagtcgggattcgccgccacgtcggcctcgttcacacccgccagacgggagtgcggctgcagcgcgatctcgtcgaaaccattggtcaggaagcagtactcgtcctgcaggtactgcgggaacaccccgaatatcttctccggcaggtcaaccttgcgcacgccataccggtagttgagcgcccccatcgcgccccagcacaggtacatggtggagaacacatgggtgctcgcccagtcgagaatcgacttgaactcgtcccagtaatcgacctggtcgaacggcaggtgctcgaccggggctccggtgacgacgaaaccgtcatagtagttgtcgcggaaggcatccagcgtctcatagaacttgaccaggtgatcgtgactgacatgggtcggttcgtgggtggatgtcttcatgaagtcgatttcgacctgcagcggcgatttggagatcaggcgcagcagctgcgtctcggtttcgaccttcttgggcatcagattcaggatcaccaatttgagcggtcgcacacgctggcgctccgcctcgggcttctccagggcgaagatgcgttccgagtcgaggatggcacgcgcgggcaggccgcttgggatcttgataggcatgttcttattatggcaatggccgggatattgatacgccgtcaggttatcgccatgagttatgaccggttatcaatcccggcatttcactcagcgcaaaaatccgacacgccgatttgacaatctcgcattctcccctatcttagatagagctgtttgaaaacagccggcgcggggtggagcagctcggtagctcgctgggctcataacccagaggtcacaggttcaaatcctgtccccgctacgaatcgcgggaagccgtcacgaattcatcgtggcggctttttgtttcccagcagcattattgccgattggacgatgatgtcccgtgaaaaaacaacatccagccccactctgggcagaatctatcaacatgtggctcgactcactgaaggcggcgggctactcccccaacacgctcaacacacggcgctgccagatgagcgcgctgtcgcgggcgctcgaaggcgatccgagggacgtggagggcgacgacctgctcgcgcacttcgccgcgaaggactggaagccggagacgcgcaagggcgcgaagaacgcctgcgtcagctatttccgatggctcaaagcgtccggccgcagcgaggccgatccgagcgagttcctacccaccgtcaagcgtcccgaaccgcatccccggccatgcccggacgtggtcatactcaccgcactacgcaaggcaacggaaggcgaacggctcatgctcaggctcggcgctgaatgcgggttgcggcgcttcgagatagcgaaggtgcacagccgcgacgtgatgcgcgacctcgtgggctggagcctcgttgttgtcggcaagggcgacaagcaacgcatcgtgcctatcggcgacgacctcgccttgctgatccgatccgccaacggctatctgttccccggtcggtggagtggccacgtcgaatcatcctacgtcggccgacacctgagcgacctcttgggccccggatggacggcccacagcctgcgccacaggtacgcgaccacgacctacgccgccacacgagacctgctgctcgtctccaagctcctaggccacgcctcggtcgagaccacgcaacggtacatcgccatgcccgacgaccggctgcgcgccgccgtggaagccacacgcctcgccgcctaggaggatcacgatgttccgtttccccgacttgattatggtactaaattatggtaccataataagcatgatcgaatgcgaaccgtcagccttcaagcactggctcacacaaccacagatcgactacatattccggcatccggtggccgtgttcgaggtgcagtcgagacacgccggcgacagggtcatggcgatcctcggatacccggacgagttcagggaacgccccgtggagctgctggtatcccagcgcacccgcaaggtgttccacgcgatggactgccgccgcgaatggctctacaagttcgacgactaaaaacaccaaggaggacatcatgagcaacgaaacagactgggacgagctctcggacgaatacaccgagcacacccccgccatcatcggcgagaccatccgcccgcaaagggcgatcacgatggatgacatcgacgacatcttcgccggccgccccctcgccgaccagccccgccggaaggccgacgtgctctacaaggcatacctcacgcccgacatggacgcacgggtgcgggcacaggccgaacgagagcacatcggcaagagcgctctgattcgcaaggcgctggccgcatacctgaccgccaatcaggcacagcccgcgatggcctgacccatatacgacgaaaagcccccgaaccataccgtgagtgcggtaggttcgggggcttcttgttattcggtcttggatgccttggccttgagggtgcttgcgccgatgacgacgccgatggtcagggcgacggcgttgatggtcgtcgcggccggatcggcccatgtccagccccatacggggccgaggctcatggcgctcggcacggccagaagagtggcggacgcgctcgagatgacgatcgacgagttcgagtcccgcctctgacgcaggcatgcagaagcgcccctcgactcctatgcatggagccgagtggcgctacttgtttagaatctgccggtgttgaggcggctttggagtgcgcgtgcggtgccggggccgaaccatgagtcctgggcgacgccgaggtgtttctgcagggcgcggatggtggcggggccgaggagcccgtccgcggtgaggttgagcttgcgttggacggcgcggatgaggttggagccgccgccaccgtagcgcacgcacgagtccacgagcgcgggtcggccccatgtccggccgtccggcctgtactggccgctgatgatgccgtccacgctggtgcccatgacctgctgccagcggcggatggtggccggcccgcaggagccgtctaccgtgagccggcccgtgccgccgccggacgacgtggcgccgtcgttgtaggcggggcgcaggatggcggcgatggtgttccatgcgcgggtgcggcgtgctacgcgcccgttgttggtgttgccttcgatggtctggatgtacgagccgtggttggcctcgatgaagccgatgtggtccacgacgccgccgtcccagttgaatatcacgatgtcgccggggcgggcgctgcgcgtgctgaccgcgcgggagcgtcccgcggacaggacgtagggcacgtaggcggcgggcagtcccgggaacgcctgaccggcacggctcatgacccagctgacgaacatggcgcagaacgggacgcccgacgcgccatagtaggagccgtgggattgggcgtaccagcgcccgtacttcgtgcccggctgcgggtcggtccaacgggaatagccgatttcgcccgccgcgatgcgcaggacttcactcgccgtcgccataggacacctcctcgatgggtgccacgtcagcggtcgcgtccgcgcccttggagtcggacaccgcgtaggccgcctgagctgtcccggtcgtggcgtcggctgtggcgtcggtgtcggtggcgacgatgttggctttgagcgcgtcggtgagctgctgtccctgcactgcggcaccggtcaggttgttgttgcgccaccatgcgtacacggatgcgatgacggcgatgacgccggtgatcgcggtgctcacctgatcggtggtgaacgggagctggctgatgccggcgatgctcaggccggtctgcgcgacgctgaacagctggacgatgagcaggatgatcgccttggtgcgttccacggtcaggccgggaatcgccgggccggtggccttgtggtcggccacgccgctgatgtttgccataatggttctccttacagaagaagccccacgggtgtggggctttggttggttttacagagtcggacgcgcaatcgcgcgtccgcgtaggtgacgccgaacatcgtggccggcatcggaagccaccgccgcaggttctcccgcacggtgacgggcgcatcaaccgactgggtgccagcccggatggtcaatgtggccgtgccgggcttgacgccgttgatggtgatgctcatgatggctttcctcccagccggggcgcaatgggcgcattctggatatcgttgttgacctgggtgccgtggccgttgccgcccaatccgtgataggcgtcgtagacacgttgggcgcggagtttgaaatcattgtcggcgacgccgtggtggtcgtgcaccatcgtgtcctgctgctgttcgagcttgcacagcagcagcgtgcgcagcgcctcgtcgacgagtttttcgtgttcgcagccgcgcctcatgtcggccatcagctgctcatgctccgcccttcgggtctcctcgtcggcgatctgcgagcgcaggtttttgagttggtgccagaggccggcggctatggcgctgatggcggcgatgaggaggccggcgacgacgctggtgatgatgtcgtcagccatgtggctcctctctgatgggatgtcgcattggcgatcctctctgtgtgtgatggtggaatcccacggtgcggtcgagccggtcgaggcgtttgggggccatccgacggccacgcccccgccggaggagacgagcgcgacgaggacggtcagccatgcgggcgcgcccatctcaggccctcgccctgagcagcagggtgcatgggtcgggtttggcggtgtcggacgtgttggtggtggtgcacacccacttgcccatgagggtgtcgtagttgtattccttggtcctggcgttgcccgcgaccggcagtatcagataggtgccggcggtggggctggcggcgagcgcgatgcggctgccggcccggtcgtagacggagaagctgaacgcgtcgtagtagccgccctgggtggtgatgacccattggcggatgatgcacagccagatgccgggcgcgacctcgagcgcgtcgcccatggtggcgccgccctcgcccatgagcgtgctcgctgtggcggtgaacgcgctgatggtgccgtccgtgtcggcggtgatggtcgtgccgtcgggtttgacgacgccgagcgcggtgctggtggctttcttcaggccgatggtcgtgttttcggtgccgtggaactcgatgccgtcgggcatggcgttgtccccgagcttgaacgacagggcgaggtgttccccgttgcgggtgacgacggggaacgagcgcgagttcgtgtagtcgctgttgctgaccttgacgccgccgagggtcgtgtcgctcgcgacgggcagctcgtactggcctgcggaggcgtcgagggtgccgtcggcgcgcacggtgaggttgtcgccgggtttgacgacgccgagcgtggtcgcggtcgcgggcgtgcccgggtcgccggggtcgccctttgctccccggggcaggccgaacgcgagcgtggtgtcgccggccgcgtcccgggtggcggtgacggtggcgtccatgccggcgtcgagggtgcgggcggtcacgccggcgatccgctcgccgcgcgggatgtcgaggatgaggctcctgtcgcccgcgccgtcggtggacatgctggcggccgcctgctgggaggggttgacggtgttcgcggccacgccgatgatcctgctgcctcggggcacgccgaccaggagcgtgtagtcgcccttgcttccggcctgcagcatgctggcggtggcgggcttgttggggtccagggtggtggcgccggcgctggtgacgcccgcgccgcgcgggatggacaggtcgaggacgcgctgcaggccgctgccgcgcagcgaggacgtggccggctggttcgggtcgagggtggtggtgttgccgccggtgatgcgcgcgtccgagacggccttgttgatgcggatgatggccttgtcggcgtcgaggatgagctgttcgatccggccgagcttgtcgtccgcgtcgggtgatgtggcgtcgaagacggagcgttccacgagcccgtagaagttgcgcgagcacaccttgttgccgccgctgctgatctcgatgcccaacaggatgcgtccgggcttggcgagcgccttgcgtggcaccgccgcgcggaacgtggccgtcgccgcgccgctgaccgcgttcatggtcacgcggtcaccaaggtcgctgccgggactggtgttgtaggcgagcgcgcaggtgattccgtcggttgtggtgatgggtgtgccgttgtcggtgagttcgacggtgatggtgcggccgttgacgtcgccgctgttgaggcggacgtctgcgatgtatccgttggcgaggtcgagttggatgggttcgccggcggcttcgcggaagctgtcaagcgttgccattgtcgtcgtccttgttgagttggtcggtgagttgttggttttccttggcgagtatgtcgatctgggcttgcagggcggcgatttgcacggtgctgtcggcgatcatttcgcggagtttgccgatcatggccgggtggaggttcttgtcgtccatcagacgtgttcctttccgttgtcggaatgggtgagcgattcgatgaatcggtcggttgcgctgacgatgtcgtcggcgtgcgcggcaaggaggttgctgagttccgttgattcgacaccctccggcagagcgatggtcgtcggggtgtccgtttcatcggcggatgcgatggttgtggcggcggatggtaggggtgggaggccgagcagtccgcgcgttttgttgcggccggcggtgagcggatcgtcgggtgtattgtcgtcgggcgcggtggtggtgttgatggcgttttcgatggcgttgtaggcgctggtccatgcgttttcgccggtttcggggtcgggggctggttcgccgttgtcgcggacgtggaggatcgcggcgacggcttcctcgtcgctgtcgatgccgaggagtgtgcgccatgaggcgatcgcggcgagtggtatggcgtcgtggcgcatgtcgggtgtgggtggggtggtggtgatggtcgccatgccgtcggtgacttcggctggcggcgcggcgtcggcagtggtgagggtgcggtctatgaggagtgtgggttggccgttgatggtggtgatttgcatggtgtctcctattttttgaggaagcctatggtgttgaggtagtaggctttggtgcctatgtagaggttgctgtggtttacgttgatggagaggttggagacgacgccggtgctgttgttcttattccagtgggcggtgacttcggtgacgaccttctccggcccggtggatacccagacgagccagccgctggccccgcagtcggatacggtgctccagatcagcgcccagtcgtcgcctcggtggtccacggtggcgagcgccttgtaggagccgtattttgcgggattggaggatgtgaaggtgtactggctgtatgtcatgggtgcgccgctcttgtttacccaccatgccgtttggaaggtgtttcgtccgttgatgccgccgaggtagccgccgaggtacatgtatccggtgctgatgtcggcgaccagtccgatttcgccattggcgtcgccggcggtggcgtaaactttcgccttgctgccggtggctttgactcctgcgcggcaggtgtcggacggggaccatgcgtttaggattgcctcgccgccgtggccttgccgtgagtagaggtcgaggctgccgccgctgtcggtggtggagtccttggagtattcggtgttggccatgaggtacgcctgcgattcgatcttgctggtgtcgctgaggtacttgtggctccagaatcgtccgaacgcgccgggggtgccggcggtgcggtagccggacagcagggcgaggccgctcatgtcgccggtcttgttgctcctggagtacgaccatatgcttgggctggaggcatgggcgccgtcgagtgggaagctgatgccgctgccgtcgtaggtttccgtgccgccgatctggtagctgtcgaagtcggggctgatcctgactcgtttgccggttcgggcggtctggaaggtaccgacgagcaggttgccggctccattgccgtcgaggtggacggtctcgttgccgttggcgtcggtcatgacgaaccggccggtgtcgaggtcccagtagttcaggcctgcggcgccggagagtcggccggtgaagattgtgtcggcgaagatgcccttgccgttggcgaggctgcggaagtcccagtctccgtttgccttcttgtggtcggcgatgcgccagtagccgccgccgatgtggatgcattgggtggggttctggtcttcgggcttgtcgtacacgtagatgccctggccgggtttgaggtacgtgtatccgccggtggcgttcatgatctggttgatccggtcgatgaggtccttcatgtacgggccggcgccgccggcggcgctgttccatgcgccggagttggagacgagcttgtccaaggcctgctgttgggcggcgaggcgctgcgtgtaggattgccggatgttgccgagggtgatcttggtgtcggcgaggctgccggccaggtcttcctcgatctggaggatgcggccttcgaggcgcaatggtgtggtgaagctggtgtcgatgatctgcacgccgtcgccgacgtccgtgccttccgcgctgaggccggcttgtccgagggcggtcacgtcggccgtgtaggagacgacgggcgtggtgcgggtcttgagcgcgtttttggtgagggtgaggagttccttggggtcttcgcagtcggggaagtccacgcttgcctcgctgtggtgtttggtgccgtcggggccgggtatgccccagttggcgagcgcttggtcgtcttggacgtagggtttgccgtcgttgacgtcggcgaagctgatcttgcggctgtatccgccggtggcctcgccttggtcattggtttgttcgatgcctttgccccacccgtagaggcgggtgatgacgtcgccgctgtcgatgtcgcgtttgatttgggtgaggtccttgccgtattcgaagcgtttcgtggtgttggtggagccccggtgttcgacgaggtggatgatgcgccggccgatctggttgccggtcgggtcgggctggtattcggtctggacttcgagcccgtaggtgtcggcggtcttctggacggcgtcgaggacggtgcagtggtagaatgcgaggtccgccgtgccggtgatggtgccggtctcgacggtgccgaccgcccaccgggtgccttcgagggctttggtcaggcaggctttggcgttcgccttgcggttgcgtttgtcctcgatgtacgtgcgcgagagttccgcgatgctgccggtgcagtaggcgacggtgacgggcatgcctgcggcgcgggcggtctgggtggactggcacaggtattccgcccagcggcccatcgagtccttgaacacgatgcgttcgtccttgttgatctcgccgatggtggtgatgtcgagggtgtcggtcgcgtcggtggctttggtgcggatggccttgatggcataggggaggtcgccgagcgggttgccccagcggtcgaacagcatgtatcgcattggtgctcctagatgagggtgagtggcctgtacgtgaggctggcgctggttgcgccggtgagggtgagcgtgttcaggccgggcaatagggggaagtagtcggattcgagtgtgggggccatgaggttgccgttgacgcgcagctcgcgcttgtcggggtcggtgatgatggtgatgcggccggtgatcgcggtcatgccagcgatggcgagggtgtggccgtgcgcgtccttgacgctgatggtcttcgcgccgttggcgggggcgatcgtccatgtgggccagcatggccggttgcctttggcgtggatcgtggtcgcccccgttttgagcgcggcggtgatggtgcggccgatgaggcagggatgggcgtcgatggtggcttgcacgagcgtggcgatctggtggtcgccggtccatttgtcctcccatgcgccgaggctcaaacgtccctcgtattcgccgggcaagccgcgccatgagagcgtgaccacggtgccggagagggcggcgaggcgggttttggcggtgaggatgtcgtcttcgccgccgatggcgtacaggttgagcgtgatggtgcggttgcccatgtatgcggccccggtcgggtcggtgagggtcaggtcgagccggccgtcgcggccgggcatgtcctgcatgctcaccgtcggcgcggccttgtcgatcgcgatgccggcggaggtcagggagagcatcatgcgttccagcggcgtgccgttgagcgtggggtcctcgacatgcggcaggcgcatgcgtcgctggtagagcatatgctctcctctctggttttaacggcctctcatggcgaggctgttgagttcgtagctcatgggtttggcgagcttgccggccatgacctcgccgccccgatcggacaggttgagcgtgatcccggccgtgagcgcctgatcgatcgcgtcgatgatgtcctgcttggtcgcgtactcggccgtatggtcgtccaccgtgtaggcgatccggccgttgccgacgacggccgagtatgcgagcggggtttcgagccggctggcgtcggtcttcaggctcacggtcgggaccatgtcggtcagtccgtcgatgctgtcggcgacgaggccgctggccttgtcgatgccttgggccatgccggcgggtatccatttgcccacttcgtcgcggaagatgcgtgacgggctgtggatgccgagcacgcccttggcccagccgatgaggtttttgccgagattgccgatggtgtccttgacccatttgaacgctccgccgatgccgttgatgaggccttggatgacctgacggccggtgtcgtacagccatcggccggcgccgctgaccgcgccgagcacggtgcttttgatgcggccgacggtgttgctcacgctctggatgccgttggacacggccgatgtgatgccgtgccagatgtttccgaggaacgagctgacgcggttccatacgctcgtccatacgccgctgatggcgttcaggacggtcgagatggtgttgcgcacattctggatgcatgtggacaccacgccgctgatcgcgttccagatggtggacaccacgccgctgatcgcgttccagatgctcgcccacacgctctggatcgcgttgaggacgttgccgatcgtggtcttgatgccgttgatgatcggcgtgaggaacgcgacgatgccgtcccatgtggtcgtgaagaacgatttgatcgcgtcccatgcgccctgccagtctcccttgaggaagctgaggaacacgacgatgactgtgcggatcgcgttcaccacggtcgagatgcaggagctaatcagcccgaagatcgtggacacgacgttgtagatcgccgtccatacggtgctccatacggtgttcgtgctgttcatctgctgggtgatgaacgagagtatccagccgaacacggtgttgatgccgttctggatcgcctgcaagggtgcgacgatgagcgcgccgatgacggtgaacacgttgacgatgaagtcgcgtatcccgttgaatatcgtcgtggcggtcgtgctgatgccgttccagacgccggacaggaacgaggtgatcgacgtccatgcgctggtgatgccgccgctgatcgccgaccacaggttggcgaggaattcgccgagcccgttccatatcgccttagcgccctccacgagcgcggcccatgtctcggacagccatgaggtgaacgcggcccatgccttgcgcccggcctcggtctgggtgaagaaccatgcgagcgcggccacgacggccgcgacggcgacggcgatcgcgccgatggggttggcggctatgacggcgttgaacgcgccctgcacggcggtcgccatcttcgtggccgtgctccatgcggtctgtgcggtcttgacgaggctcagccctccggccatctgtttgagcatggcgaccgggccgcccaggtccgtcatgagcatgatgccgttgctgacgcccttggcggcggtcgtcaccgtgttcatggttccggtgagcgcctgcagaccgctgttgagcgcctgatagcccttgactgcggcgaacgccgtgccgatgccgatgatgatgggcgcgagttccttgccgtgccggacgaaccagttgagcgtgtcggcgacgagtttgatgccgttggcgagaccgtctggggggatcatgtgcgcccagtcgatgaccatattgacgacgcccatgatcgcgtcccgaatgttgtcccatgcgcttttgaacgcggtgatcgcgccgttttcctccagtttggagtagaggcgctggaaccagccgatgagcccttcgatgcctgcctggacgacgggcacggcgttggtgacgccgtcggcgatccagctcatgccgccggtgatggcaggtttgacgctgtcgagcacgctcgcgccgagcttgacgaacgcggcttcgaggttgccggtggctccctcgatggtgctggcggatgtggcggcttccacggcggcgtcggtgaagcccagggacatgatcgcgtcgttgaattcctgtgcggtgatctgcccgtcggccatggcgtcgcggaagttgccggtgtaggctccggcttccttgagcgcctgttggattttgccgcttgcgccggggatcgcgtccgagagctggttccagttctcggtcgtgagttttccttggccggcggtctgggtcagtaccatcgccacgcttttgaaggtgtcggccgatccgccggcgacggcgttgaggttgcctgcggcttcggcgagccggtcgtagttgggcacgccgttggcggcgagctgcgcggtggtgttgcggatgtcgttgaggtcgtagacggtcttgtcggcgtagtcctgcgtgctggcggtgagtcgtttgatctgcctctcgctgacgccggcgaagttcagtgtgctggcgaacttctgggcgctgtcggaggcgctggtgatctcgccggacaggcccatgaacgcttcgatggccttgcccgcgacgctttgcgcgatgccggtgatgacgccgagtttcgcgccgaagccgccggcgaagccgttgccggctttgatgccggcggtgttgccagcggtttccgatgcgctgccgaacgccgattcgatggccttgccgacgcccttcatgctgggcacgacctgcacgaacgcggtggcgatctcgattgccatgttatgcctccctgatggtggtgcgcggtgcggccaggtatgcgtttagttgttcgtcgtccatcgccacggcctcgccgcccgtggcttcatgccggacggtgccggggcgttggagttgtccgcgccagcgcgcgcccttgcgtgaggcttccttggttttcgtccaggcgaggaaggcgaggctgtcgcggatgtcggcgaggaggtaggtttggtcgtcccatgcgaggcgcgggttgatttttggccagatgatggcctggcggggcaggttggcggccagtgcggccgcccggttggcgggcagttcgcccgtccatatgaggtcggtgtcgagcccatagaaacgctggaagtccgcttcgagcgcgtcgggtgccgtggcgagcattcctatgagcgtcaggagtttggggcgacctgttcgaggagctgggcgatgaattcgctgaccttgtcgatgctcacgcgcccggtgtcggggtcgcgcaatgcgtccttcatcgccgtgtactggtcgccgcacagcttcttgaggaaggggacgatggcgaacgcgccggtgccgtcgccttcctgcgcggcttggaggtcgtagaggtattcgaccatgtcgaggtcgttgaagatcgcggggctgatggtgacggtgacgcccatgacctcgacggtcttgggctggtttttcggtgtcttgtggtcctgcggctgcttggctgccatatgcgtgtcctttcagagggggtgcgcccgccggacggcgggcgctgggtgggattcacttgccgagcgaggcggcggtgacgttggcgatgtattcgacgctggtggctccgttgatgaggtcgctcgggttggcgctcatggtcacgccgtagccgatggcgtcgccggcgctgtaggtggtgtcgtcgaattcggtgatggtgccgtcggcgacgacgatgcgcttgacgcggttgccggtcatggcgatctcgaacacgagcacgaggctttcgccggacgggatggcgtggtagacggtgagcttgtctgcggtgccggtgacgttcgcggtgccgaaacgcagtttgaggctggcttcgttggtttcgatcatgttgaactgccatgtctcgccgtagccgctgatctcggacagcaccttgatgccgcccatctcgttgatgtcggtggtgtcggtgtcggtggcgttggtgacgccgtcctccgacaggtagccgacgcaggtgtaggctgccggcagggcggtggtcgcgtcggagggcagggcggtgccggcgggcgcgtagtagaggcagccggtcttcttgggcttgccgaggctgacgtttttcttgttgttgtggttggtttcgaccatgatggtgcctttcggatggtgcggcgtcgtcttattgggttgcggcgtcgagctggatggtgatctggtatcggggctgcggcggcgggccggggtcggggaagtcgatgacgctttccacgctgacggcggcgatggggtcgagcaggtcgaggtcgagcagtcgaggcagcagcgtgccggtggcgagctggcttgcctgccatcggctttccgcccatacctgtatggcgaggatggggtggctgctgtattcgagttcgctgccgccgacgcgctcgatggtcacgaaccgcctgggccggtctgcgggcacttcgaggtaggcggtcaggccgtcgccgtcggggtcggcgtcgatccagtccttgaccgttttttcgaggttgaggctcattgccgtttcaccgccttgagcagcgtattgtgcttcgcgttgtccaccatcgccttcacgttgccttcggagccgtgcccggtcgtggcgagcgcgacgctgcctttgggggtgctgacatgggttgcggcctcgtaggtcgcgccttcgacctgtgccatgctgttggcgcgggcggcgatgagcgcggcctgttggtcgatggtctgctggatgggtgcggattggcgtaccgcacggaagccggcgaggttgagtttgacttttgccatgcgttgctctcctagcctctggtgtcggcgagttcgacggtgaggttccatcgggtcggggtcatgccgcccgtgtaggggcgtgggtctccgatcacggtgtattcgacgccgtcgattctcgccttggccccgcgcaggctccggtagggccatgcgcggggcatgtggatggttttggcggtgcggatgccgtcggggcggatggggtcggtggagttcgattggctgccgtcctgtatgagcacgtcgtccacctgttcctcgcgggtgccccagatgattccgccggcggggtcctcgccggctttgacgcggtggatgagggtgatggtctcgcctctcatgcagcgcctccggccatgtcgtaggcccatgcctcgccgtcgccgcccagggcttccttctcgctcgtggtgaggtagaggtcgccggcggggttggcgtagctcaggctttcgctgtagctgccggcggtctgggtggattgggtgacgcccgacatgtcggggccggcctgcatggctcgtttgacggccatgcaggcgatgcgcttcaacgtggcgggccgggcggtgtgccagcgcgggcaggtggtgcggatcaggtcggaggcgtcggcgagcagcgcttcggcgcgggttcgttcggcgccggtgagcgcgtgccatcgggcttcgaggtcgccgacctgcgcgaacggcttctcgtcgtccgtttcgtcctctcccccgccgtctgacgtcacggttgtgccgtcggacaggttgagcggggtgctggggtatccgtccatgcggggtctccttaggcgagcaggccggcggccttgagcttggtcagcatggagttgaccttcgcgatgatggccggcgagtcggcggatgcggcgagctgcgcttcggccgcctgctggagcacgccgccgcgcgcgccggcggtcggcgctggcggcgtgaacgtcgcgggcttgccggtgatggccgaccatgcgatggttgcgacgccttccgcgaacggggtgccgtcgggcttgaccagacgcacagggatgacgaagccggcctcgtcggcctcgtcgtatttctgtactacgagcgtctgggtgaggggcgcggccatcactcgctcgccttgacggaggttccgggcttcttgagcacggcgatgcccttggggtcgaggatcgcgtaggagtacatggcctcggtgcggtaggcgatctggttgacgcccttgaggtccttgccggtgttgtcggggtcgccgtattcgatgatctcgctccagatgtcgcgcaccatgccccacttgatgaggcggaagtcgccgaggaaggcgaggatgccggtcgccggggtgatgaggcggccgttgaccgtgccggaggttgcggcggggatgccgtcgaggttgccgacctgaaggttgatcgggatctccgggtagaagcgctggccggtggaggggacgcggatcttgcgcagctcgttcgccatggtcttggacagggcgatgccgttgatgtcgtactcgtcgctgacggcctcggcgaggctgtcgatgtcggcgacgcgatcgtcggtggccggcacgctgaccgcgcttttggcgagcgcgttgaagccttcgagggtcgttttcttcttggggtcgaaggcgtggtagatgacgtagtcgaggacgcggcccattgcggcggcctggtctgccagaatcttgctggtgatctccagtttggcgtcttcgtcggcccactggagctcgttgctgacgcgggtggtggtctgtaccttgaagcgtttgccgacgacaggggtgagggtttcctcgtagctggacttctgtgcgccttcggcgacgacctcggcttcggaattgccggtgaagaccatgtagtccttgtcgaggaagagctggggttcgctcggggagagcgcggcgatggtgctggtgtccttggcgcgcttggtgatgacggtggctacttccttggggagcagcaccttgctggtgtcgagtgccatgatgatggtttcctttcagatgaggggtgaggaggtgttggccggttagaggccgaggttgcgcaggtagttgaccatgctctcgttcgggcctttgccggacggctggcggtccgcgccgtgcacggccggggccttgggtttggggttgagcagctcgtggatgcgcttggcgtgcgattgcatggcttcgaggctgtcgccttcgatcacgtcggcgggtacgccggtctcgtccgacgcctgcgccttccactcggcccgttgcttggcggtttcgtaggaggcgaccttgtcttcgagttccttgacgtgtttggcggccttttcctgttcggtcatgctcgcttccttgagcttttccagctcttcggccgcgttcttgttgtccttggcgcgtttctcccactcgcgcgagtgtcggatggcgtcgttgtacttggcttgccagtcgatgtcctgcggggtctcgttctgatcttcggcgtccgagcctccgccggggtcggacggcgcgtcgatgaggcggatgtgcttgggccactggtggtggaacatggttgcgtcctttctggatgtgcgcccttttcgggcattaaaaaaagccgcccgtgcgggtagctgtagtggtgggtgcaggattcgaacctgcgtggcttgcgcggccgctttacaggcggctccattcggcctctctggcaacccaccggatggtatgattgagctgtaagcgcccccgctaccgccatttgggtagtagccgaggcgcttacttgattctttggagccgttggtctttggagatgatgtagacggccccgtttttgaagcgattgctttggaggatgtatcccttgagctgttcgtcgctcatattcgggttttcgctgttgtcgatgatgagtctggtggtgtcggtttttttgccggcgctgcctaggtatccatcgatcgaccggaatgatttggctttgtccggcgtcttgatttcgatgcccccggcccagtcggacaggccgactcgttccatgatgtgggtctcggggttttcgacttccttgtagtcgagttggaacattggtttgatgccgaatttgcgcgcgcgttcggccgttctgatttcttggggccgggctttttgcgtttcggctttgattgcgtccgatgcgaattcgatgcttggttcggtgccgtcatagagccattgccggtcgcgccagcccatttccgagacgatgcggtgggtggtccattcgtcgtatttgtctatttcggtggttttattgcctttggctttcatctcggcgacgtatttcgcgtattcgtcgctgttgagcatattggctatggattggcggcactgcttgtaccgttccttcatgccgtcggggtcgtagcctttgacttgcgcctcgccccagttcgatacgatgcggcagtcgtcgttcttgtggtatcggctgccgcgtccaccggccttttcctcgctccagtagacgaagcctctggaggccatgaggatgcagaaggcgcaggtggggccgactggcacgcgggcgtatcttggttgggacgggtcgttttctccgttgaaccgcgatgtgagccgggccgtggagccgacgatgtcggcggcgaggttcatccattcgtcctcgccgtatccgtccgtcttcatcgtccatagatcgtccatcgtgagtccggccttgctgcggttgttgatgacgtccacgaatttgaggccgacatggtcggtgctgttgtatcctccgacgatctgccagaatgcccggtccgcgcttacttgggatggctcgtattcgggcagatccacgccggccgcttcgctccacgccgacctgacggcgtcgtagtagtcgttggcgagccggttggcgcggccggcgtattcctcgaagacctcggtgcgcaggtagtgcagagggtcttcgaagttgtcccatgccacgccggcggccatctgtttggcttcgagggtcaggtcggcgagcatgtcctgatagtcgtcccatagatcgtcaagatgcgtttggaacgcttggcgctgtgccggactgaggttgtccagcggcagattggtcggtgttcccgttgccattgctgttcgccccctgttgttcgtcggtcttggcgatggtcaagcgtgctcggagctcgtcgatggattgctgcgtgcgctgctggcgttcgtaggcccggtgggccttgatttcgtcccatgtcaggccggcgcgggtgagtcccacgtcgctgtcggcgaagtcggggttggtggatgcgaccttctggtaccagtctgcgcgggcggcgtcgctggtttccttgaccggtgcccagatggggcgcagttcgcgcaatgcgtcggggtctgcgccctgataggtcagtgcgatgctcatggcttccttcaacgcgcggccgaagcgcttgttttgccggtcggcggtgcgtgacagtttgcgttcggcttcggccatcgcctcggccgaggcggggttgtccatcgtgatgccgaggtcgttgacggggatgtcggtttcggagctgaccatgagggcgatggtgcgcagcatgtcggcgtgcggggtcatggatgcctgctggagctgctgcatggtgggcttgtcgccgttcttgttggcgggcatgccgttcatgacgctcacgatgctgctccatgtgtcgtcggtgaacttcttcgacgctccgatgaaccacacgcggggggctgcgtagaattcggcggtggcctccatgcgcaccatggttcgcaggccgaagtcggtcaggttcatgagcgtgcgggtgatgcggctgttgcccagcggatggtaggactgggcgtcgttgacgaggggcacgacgcttggccggtcgaggtgggtttcgatcgtccgcgccgtccacaggccttcgctgtcgtcaatttcgtagaccttgccgggcagccatgcggtgaacgcggtgatgcgcccggttctgtcgtccttgtcggtgatggtcaaagccgagccgaggcggcggcgtcggcggtcccagatgcccgcgctccagtcggccgagcggggcagcatgaggatgcggccgggttcgtcggggtcttcgcacacggtgatgaagctgcatccgtggatgtaggcgctggtgatcgcctcggagacgtcggtgtcccatgcgttgtcgtccacgagttcgtccacctgcgcctgcaacgggtcgggcgcgtcgaagccctcgaacacgttgaggtcggcgagcgctcggactgctttgttgggccatccgatcatcggtttggcgagggcgcgcatttctttggggatgctgtaggcgacgccgttgtatcggtatcgggcttggtagtattcggctctcagcatgttgcgtgcgtagtggtcgcgccatgttgtgaggagtttttggatggtaggcatgtcgtcgtcttcgacgcctttgatgcgggtgatgttggcggattggacggcgaggtaggcgtcttgggtggcggggttggtgatggcgaggccgttgtggtcggtggcgggcattagaaccatgtctccgtttcttgggttgggtctcttctggtggtcatggctccgtggagggcgagggtgacggcgttgagtgggctgatgtcggtgtcgtcgtcgggtcggttccatccgaagaggccgtttttgccgatggggcgtgtggtggctttggcggcggcttgccagagtggttgttggccgtcttcgggcaggtgggtgagggtgccgtctctgagcatgtcctggaggcgtccgcaggcgcggcccatgtcggtggcggcggtgacggtgacggtgacgccggcttcggcgaggtcgggcaggagcgcggtggcggggctttgcccgtcgatgacgagcgcggcggtttgttcccagaccttgtcgatgaggttgacggcccacatggtgccgtcgtggttggtgtccctgtattcggcgagttcgatgtgggcggtgccgtcgtcgtagcgcatgcatgcgccgatggtcaggcgtgtgcgtgtggggttcatgtcgatgccgaagctcatgacgccgccggggcgacgggcgtcgatggtggcttcctcccactgtcggcggtcgatggcgcggctgagggcgtgttcgtcccagatgccgagggcttcgcgccggaagtcgtcgccggtgaggttttcccacaggttggcgatggattcgtcgctggtgtgggccgggtagctggggttggctttcctccattggtcgcggtcgagcgggtaggcgtcgcggtcggcggtgaattcgacgtagagggtgctgtgggtgcggcccgcgcgtgatttgtccctcaggcgggtgaacgcttcgccgttgtcccttgggccgggcggggtgcccatgtagatggtctgggggttccaggcgcggttctgggtcggcagcatggatgccatcgccgagtcggacaggtgctgggcctcgtcgatgacgagcagggcgatcttcttgacgccgcgcaatgctccgcgttctcgggcgcggaagaagatacggctgccgttgcggaacctgatctcttccttgccggcggccagggatatgccgtggtcggggtccacgaggccgctcatctccggcctgagcacgatggcgcacatgctttcgaacgtgtccttgatgacgctgaagtgctgggcggtccatacgatgcgcatgccgggggttcgggcggcgcggtggatcgcgacccagccgatgtcgtaggtcttgccggtctggcgtggaatggacagtacggcgttgcgggcggaccagaagccgtcggcgcttttcgcgaggatgatccggttgatctgccgctgccagacgtcgaaccggtcgcccgccgccgcggcgaggttgttcaggctcggctctccgctcgtatacaggtcgtcggggatgatctggcaggccgccccgtcaatcctcgtgctcatccaatcgttcgtcctccgtgtccagggcctgcatggccgggtcgtgctcgttcgacgccttgtcgatcgcctcgatctcggcgctcatgtccgccaagcgtttcgtcagactggcgaggtcgcgtgagcttatcgacccttcgtcgagcttttcggcgatcaggttgcgcatcgccaccaggaggcggcggcgatccccggaagcggcggcgttgctgaccctatgggacttcgacgcgctcttcgaccgggtggttttcgacgttccggcgaccatgacggctccttgccaagtgtggaaaaagtccgggggaaaaacggccctttgcccgtggtggccgtcagggggccgggtgggggctactccccacccccgaaccagtccgagcatcggatcggctggcttggagccgtggtgtcgtcgtgtcgcggcgcctcgccgtgggcgatgaggtaggcgacgcgctcgcgtgcccatgccagaccgtgcgtgcctttgatggcgttgcaccatcgatgcgccggaccgctgttgtcgtgcgtcagggtgccgcctcgcgccaagggtatcgtctcgtcgatcacgaagctgtacgggtcgggcgaacgcaacgtgtagtcgatgggccgataacagatgtagcagtcggcttgcatgtgccgccaccgctgctgctccagcctgcgccgatgcccgttgcgtttgcgcgggttgccgctcacttgagcctcggcttgctgctgcactggctgacctcgacgccggccctgaacacgatctcgtcggcgatcaacggcacccacacgatgcccagatcgtcacgagaaacctccgggtagggctgccggtcggccatcgcataggggaagatcacgccatccacgagcacccgccccctgcgggcgtccacttcgatacgcttgggatacaacgccatgacacgcctccaatcgaacgcccacacgaacaacaaacggcgcccgccgtcgggaagcagcgggaagaaccgccggcgagacgtctgtctgcggtggtttctcgggtgccgcatacgccggttatgcacggtgccgacggcggctggcggatggcgcgggattcggacccgcgaagcatgaggcttgtcatgcttgcccgcctagcaagcgggtgccttcggccgctcggccaaccatcccggatatgagaaaagccccgccggcatgggcagggcttttcgatactccgattacacgcgacagcgtaacacggaatcgggtcagggttcaagcgtcgcctgcgtcccgcgcgtccttggcttgggcgcacgccagcaattccagaatgttccacgcccaataggggccgtcgatgtgccgcgtgcggggcattttgccgcgcgtccgccagttcttcaagtcgttgccgctcacggcgacgccagtgttctccctgacccatcgggcggcgtcggattgggtgcgggtgatgtgcatgaggcccgcgcggcgcaggtattccaaccgcacgcgcttcaaatcgagccatgcgccgcattcgggacacaccgcataccgcgcggaatgggcggcgtagatcggcgtgcgcaccggttccccatcatcccccaacgtgttcaggcagtcggggcatacgccgacaagacggcgctcgtcggcccgcgtggtggcggtttcgaccttttccgacagtcggatcaggtcggcgtataggtcgccggccgtgtcgagtcgtgcgaggtcgtgcatgtggtgcagcagcaggctggtgatgtcggcccattgcatgagggtgcgggggcggccgtatcggtcgtgtccgatcggtttgacgccgagcatgccgccggtgagttgcaggtgcgtttccaccgtggagtagagcgcttgggcggcttcgttgaccggtggggccgcgtatgccgcgttgccgtggcgtggcgagcgttcgcgggtggtggcttgtttgtaggcgatctgttggagggcgggcatgccggccttcaagagccatgcgaggcgtttcgcccagtccttgacgcattccttgcacaggttcgcgtcgccggccggtttgccgcaggccgcgcaagctcgttgttccatcatcccagccctttcgatggtgctatactcacttgttggacaatgcgagcctctgccgaaaggtgggggctttttactttcccataaagccgttcccgccgtggtggatgggctgggaacggcttgtttttcaacggtttgctggcgttccttaactttctcttctattgtcgccgatgccggcgggtttttccagcgcgtaccgtggttcgaggaattcggggcgtttcggctgtacgggcgcggggtgggcttgcaggatgatggccttcacctcgtcgatggggatgcgcagggattgcgcggtctcttccggcggcacgcccttgccatgccattccacgatgatcctcctgacgccttcggtgactttcatcccttcgcctcctgccggtcgagctgttcgcatgcggagtgcttggcgcacatcatggcgacgcggcgcatgcacttgcggatcgcgctgtcgcaggagagggcgatgacggtgaaccggccgaagcattcctggtgcgtcacgtcatggccgggtgcggcggcgccgcacatgaggacgaccggcccgatctggtaggccgtgacgtcgatgtctatcttcttgttcatttcctgtcctttctttgtctgctcatgacgccgtattgccggccgccccatatgccctgcaacgggtagccgttgatgcggctatgcccatcggcccactcgcggcactcgcctatgaccgggcatgtccggcagactgcgagcgccgttttggttttggatggccgggtgctgaaccagagttcggggtcgtggccgcggcatgcggcttgatgtatccagttcatgggttatcggtctccgtcgcggtaggggttgatgtgtcgggcttctttcatggcgtcgaagcggccgtagcgtgcttccatgagttgtttgccttccccgtaggcttggatggtttccgggttggtgcgggtgaagggttccacggtgtcgctgatggcgttgacatgcacgttggtgaagccggccgcttcgaggcgttgctggatggtgagtgggctgtgggctggcgtatgggcggtgaagctgacctgcatcattcgtggttcctttccgtgagtcgtttggctatggtctcgccgagcggggtgatctgccatcgtccccatgaggcgtgttcgatgtagtccagttcctccagtgcgtcgaacgtgcgccggtggttgcgatcgagcgggtaggcgccgccggtctcgtacatgtcgagcagcaggccgcgcatggcgggcgtgagccgtattcgcttggtcatgcttggtatcctttcgtgagccatgcgggcaggcatgggaacatgccgatgagggtgaacgtgccggtgacgccgacccgatccgcgacgaggcggcgtacttgctcccgttgctgttcgctcatgtcaggctcccggtcatgtcgtcgatcacctggcaggagatcgcgtcgatgcgctcgccggtcttgacggtcaggcacaggcgtttgacgtcgccggtgtgcctgatctcctgcgtgacggtctgcgccggccgttcgccgagctgggcttgttcgccgagcccgtaaccgacggcgagcgccgcgaaggcgatcaccgcagcggtcgcgatcttgatggcgtatggtctgccgttcctcattgttccttctccgttccgttgataaagctccatgcgctcactgcgacctgcttccaccattcgagctcacggtcggcgatgcgcttgccgctctcatacacggtcgggcgctcgccgttgtgttcccagagggcgagggcgagtcgttcgatctcgtcgggggtgaggggcgtggcgcttatggcttgctcgatactgacggcgagcgcgagcgcatcgtcatgcccttgggcgtatccgatcacgtaggcctcggccggactgtcgttgccgagtccggcgtcggcgagcgcgttcaacgcctgttgtgtcatgtcgatgctcatgcgtcttccttggcttggttggcgatttggctgaattgttcgagatggacgatccagcgcagcagggcgagggtgacggtgtcccggtacatgtcctgcgtgaggctggggtgcgccgagtagatcgtgtcgccggtcttgtcggttttgacggcgacgagttcgacggtggtgccgtccgtctgatcgcacatgatccgaatgcacgtcatatgcccgcctttctgtgtttgcgttccgccttccatttcacgtggtagagcatgaacgcggtcagactgctaataggctcccagaagtcaccgtagggcaggtcgagccgccaccattgcccgcagaccgggcaacgccataccggatcggaacccgtgggcttgcaatactgactactcacttcaacgcctccgctcgtgctgccatgatcgccaaccgcgccagaagccggtattgggccttcgcatccgggttcatgtccggccacaacggcaagacctcctcgacgctcatacccgaagtgccggcgtagacggcgagcgccgccatatcgatctcacgatcggtgtgcttgcgcagcacgccggccatgtacgctttacgtgacgcgaggcactggccgagacgggtgatgccggtgaggcgctcgccgttgtcggggtaggggtagcgttccttgatctcgtgggtgatgatactggtcatgcttggtcttctttcgggtcggtgggctggtattcgagcaggtaggggctgagcttgtctcggtggtctcggcgtatgtggatggcgccgatggtctggtcgttgagccgttgggcgcagtcggggcatatgtcgatctcgatgtcgttgagctggcccatggaggtgttgttggccgaatacccggacaggctgaatcgcagcgcttcgtgtttgctggttccggcgccgcattggtcgcagtagatgcgtgtgctcattgttggttcctttcgtgttcgatgtcgaggtaggtggtgtagtcgttgcggtctcgtgtgatgcagtcttcgaccctgtgggtgcccgtgtggccttggtaggggttgtggccgagggctaggtcgctgatccggtaggtgctcaaatcgagtttcctgtggttggcgagggctctaagccagtcggggtggaggtaggggctgagttggttggtgagcacgtcgatgtcgtagtccacgttggtgccggccgggtggagcacgtactgggatgcctcggtgttgaggaattcgcttaggttgcgggccacgttcgcgtatccgaattcgttgggttcggtttccatgacggtgtccaagagcccgttgtcgaggtgcatgcgcagcacgtatgggtcgaggtcggagaggctcacatcgtcggggcggacggggcagatgaaccggtcgccttcctcggcggcgtcgaggctggtgacgatcatgccgatttcgaggattttcgcgtcggtgcggctgatgccggtggtttcggtgtcgatccacaggagcatgtggggtttctcgggcggtcggggcgggtcgagcgggatcgaccggccgccgacggtgaggttcctgacactggtgttcattcttggattcctttcctgacgctgacgggtcagaacaacatcgattcgtgcatctgcccgtccaactcacgcaagatgcgcacgctcgtggcccaatacgtcttcttcagttcgatcgacaggccgcgccggccgagcttgacggcctcgtacacagtcgaaccgatccctccgaacggatcgaacacaagctcaccccggttcgaccacaaccggatgcaacgggcgatcagatccagctgcaacggcgagatatgccgttcatcatcggaatccttcgccagccgggcgttcagcacgtcggcctgcttgatgtccatccacacggggcacacatgccgctccgatccaagcgtctcgtcgtgcccgtagtcgaaccagatcggggaagcccattgaatccactcgtcgttcgtcacgtccgtcttgacgggcacgggattgtcgcccggcttgcggaacaaaagcacgtaatccgcatacgcgggacgactcatcgcggaatccttgttcttcgtggtgaacatcaatccctgcgccttcgtacggatcgcctgagcctgcggatccttccacacgcacacctcaccgtggtagatccacccggccgactcgtagtcacggatcacgtcgccacgaaaatcatgcgtgcccacatacccgaacgacgacttcgtgcgactcaactgcgtgcaatgcacacacgccaaccgccccggcatcgtcacacgcaacaactcgcggatgatatacccatactgctcatgaaacacgtccgcactatggttattcgacagatcacggatcgaatcggaaaacgtgaacagactcacgaacggcggcgactgcacactcaacccgaccgaatccgcctcgatctcacccatgcgctcgcagctgtcgccgagccagagctgccagtcgttgcccttggcctcgtcggtggtgtatgtttcgtcgatcatgtcatgccgcctttctgtagttgcgtgtttcgttcatggtggccacgaggtcggcgctgagcatggtcgcctcgtgttccttgcgttggatgttggccgcgatctcgctttcgaggtcggagcagacgatgtgcacgtccacgacgtggcgctgcccgaatcggtagcatcgtcggatcgactggtagtaggattcccagctgtcgttgatgccgcagaagatcatgcggtggcagttctgccagttgaggccgaacgcggccatctgggctttagtgacgagtacgcggatgttgccgtcggcgaagtcgaggaacgcccgggccttgtcctcggcgctcatgctgcctttgacgttcaccgcgccggggatgagtttttccagccggtcggcctcgtcgttcagcccgcaccagatgatccattggtcgtcggggtgccggttgacgagttcgacgcttttcgcgacgcgcgcgtccagcgtttcgcggcgtacgcgcgagcgtcctcccacgccgccgatgtcggaggcgaacagctgcccgtccggcacggatccccggtatggtacgtagtcggcgtccacgtgcagtccgggcagttcgaatccggcgtcgctgccgccgatgtcggatggtttgcgcaatgcgatggcccattgggcgagccatcgcatgaacgcggttcggccgtgtcccttcagccgccatccgctgcccttgtccgcgccgaggttgttcgtgaagtacgtggcgaggatctcctgtcgggtggagtgtccgaggaattcggcctgcgaggtgagttcctcggggtcgttcggcgctggggtcgcggtgcatgccagacggtggcgcaccggtttgaagtggttgatcagcatggtgcgggtcttgccggtggattgtttgaggatcgacgcctcgtccaggacgaccgcgttgaacatgtcggcggggaacgattcgacgcgttcgtagttcgtgacccatacgccgtcgcctgtgatctcgtcgggtgttctcacgtaggtggcggtcaggtcgagcttgcgggcttcgcggcatgtctgctcgcacacggccagcggggcgacgacgagcctgcgcccgtcgaaccggcgggcccattcgagctgcatcatggtcttgcccagtccggtgtcggcccagatcgcggctctgcctaccttgagcgcccatgagacgatgcgtttctgccagtcgaacagtcgggggtggagcgttccctcggggacgtcgatgccgtcgggcggttccgtgtcgcgtttgcgtttcaggaattcgtggtagctgatcattgtcgggatcctttcgggtgtttgatgtcggggatgtagccgggctggtccgagggtggttcggccggggtgcgggtgccgtccgggtcgagtcgctgccagccgtgccgctggtagtagacgggttgagtggtgggttcgtcgttcatgtggacgaggtagccgagccggtaggcgcgtgcggggtgggcgtggacccatccgtggcatccggtggtgccgctgccgcacagggtgagcaggttgccgggctcgtgcaggttgtcgtagccgtggccttggctgcgcattctgcggtggtggatgctgtacccgctccagccggtgtcgatgggctggccgcagatggcgcatttgaagccgtcgcggtggaggacttgccggcgggtttcgttggtgggtttggtgctcatctctgggcctttcgttggcattcgttgatgatttccttggctttttgttccgggttgctgccggttttgacgctggcccagaagtcggttctcatcgcgtcggtgaaggtgccggccggtacgtggtctcggatgtggccggtgatccaccggtcgtcgatgacggtgccgtcgggcagcgcgtgccggtagggtttcggccggctgggcatggtgtccatgtatgcgccttggcgcagccatcggctcatgttgggcgcgtatttgggttcgtcgatggttttggcgtaggcgatggcactgccgatgagctgtctgggggcggccggcggtcggccgtcgacgccttggacggcgaggttccacgccttttcggcttcggttttgctgccggtgtggcgtgggtatgcgttccatgcggtctcgaatgggtcttcgagcatcctggcctcgagttcggccatggtgacgcgctccggctccgactcggacaccggtgtcgacgtcggggtcggcgtggaggggttgggggaggttatatcggtatgggaataggtataggtaagggtgcttcgtttttgcttgcctgtttgcttcgcgtttgcttcaccatttgcttcagcaagtgcttcaccatttgcttcgtttgtttgaagcatttgcttcgcgtttgcttcactgttgcttgaggcgtttgcttcggtcttgcttcgtctcgagcggccggacgccttgcctccggcacggccggcgcgggcgcgtttttcctgtagttccttggtggccgcgtacttgcagagcatggtgccgtccgggttggcggcgacgatctcgaacacgtcggactcggtttcgcgccacaggccggcgtccacgagctggcgggcgagcttcgggctgccgccgagcttcctgacgcgctgcatggtgatggccccgtcgtagtcgccgtggcgcagctggcgtccgacgtagctgccggcgagagcccacaggccaatcgcggacaatggaagctcctcgcattgcgggctgtcgtagatgccgtcgtcgatcatgaaccaagtcatggtgaacctctctcaatgtgtggttacttgatctcgccggtgttcggatcgacggcctctcctccgtcggtctcgtcagcatcgtcgtcgagatcgggatagtcgggcgcgctttcctcgaacgtggcgaggctgtcgtggaggttgtcgtacaggaccgcgcggcgtgcgtccttcggataggtgagcagccggttgatgacctcggcgcagtcgatgatgtgctgcgcgagcacgtccgtgtcgtacacggcctcggtgtacgggtcgatctgatggaacttgtcgaggtaggcgtctttggtttcgagctgcatcttgtggttgaccgcgcggcggaagtccacggccgcctgcttgatcttcgcgcacgagctgttgaagtccagcaggcccagcgggctcatctcgtcgggtatgagcgcgtcctgaacaagtcccgagtcctttttctttgccatgagggtgtcctttctagaattccggttcgccggcatcggtggtgaacgtgtccggcgtgtagccgctaccgccgttggcccacgggtcggttgcgggcggctgggttgtggtctgaggctgctgctgttgcggggtctggccgttcgggttgccgtaggtgccgccgccctgatagccgttgcggccgccctgtttcgtgacctgcgcggtcgcgtaccgcaggctggggccgatctcgtccacggtcagttccatgacggtgcggttcgagccgtcctgcgcctgatacgagcgttgggagaggcggccttgggcgacgacgcgcatgcccttcgagcatgattggctgatgtgcctggcgaggtcgttccacgccgagcagcgcaggaacaacgccgcgccgtcctcgtactgctgcgtccggcggttataggtgcggggcgtgctggcgatcgtgaacgacgcgaccggattgccgttggacagggtgcgcagttcggggtcggcggtgaggttgccgacgatcgtgagcagggtttcgccggccactagtcctcgtcctccatgtcctcgatccagtcgccgacgatcgcggcgagggcgtgcgcgtcctcggctgcgccgctcgcgatgccccatgccacgtcctcgcggcggccgtggcagtgcagggcgaggtcggagagcgccacataggccatgtcggccacgtcgcgcatgtgctccagctcggccagggtctcctcgtcttcctcgtcttcctcggcgatgacgcgacccatcggctgagcgtccttgaacgcctcttcgaggaacttggacagctcgccagtatcgggggcgacatacacgctcgccttgaccggctcgcacaggcgcacgccggcgtccttgagcgcggcttcgagcgcgtcccgtatgtcattctcggtgtagccgagcagccggccggcgaggctcttcgccaagcgcctctcaagcgagttatcggtcttgttggtgttgtcggtcatttcttggttcctttcatctggtagtcggccttgatcttccacatgcaccgcgcggtgatctgccgtcggtcgcggtcaacgaccacgtcgccgaagcgggggaagatcagcgtgcgatcccattgcgggtcggcgttgagcctgcggatcgtgtcgatgagcgagtccaggagctggcccgctcccatgtgcagcgcctcgtcgctcaaaggccactcgaacaggctgcacccctcttccctgtagtcgtattcgtccggtgacggctgtgatgccatgcgtgttcctttccttgtgcgcggagtatgcgggttgcggtcgcgctggacccggtcgggacggcctcaggagtcgaagcctgccgtgtccatcgatccccgctcgcacggactcctgtcagtggcgtgcgaagggggcgacgttgacgcgatcagtggacggcggccgaatcgaacggcttcccggtctttgcccgcgcccgcctgacgcgaatctcgaccgggggcgaacctgcccgcccttggtgcggcgccggtggagaggaccggcggcgcgatcattgagagaggtggtgttaacgacttgttccttgtcgccgcccgccgcatcggaaggaaggtcgcaatggcggcgggcaagccttaaatggtcagcacgagcgcgcagagaatgacgagcctgagcaactggtacacaagcgctcccggcttggccttcgtttcgcgcagcgcgccgatgagtatgaagtgttcgagcagcgcgtatccgaggatcacccactgctgccagacgagtgcatcgaagttcattcctctcctcccgcctcttcgacgaggcccacgaggaacaggggcgcgttgacgaacgcccaccacgcggccagaccattgcccaacgggtgcatgcatgcgtcatgggtcaacagccacgccagacagcagatgatggaaaccaccagcaacaggccgatcgtatacgggtaacgcttgaacatatccgccgccttatttggtctggacgagcgtgtccgcgccgtcggggacgacgacgagctgatccgcattggacagagcgtcgatgtaatgctgcttgagcacgttgtcggtcaggctctcgttgagcacggcgttggcgtcggcctcgccctgcgccttgatcttcttggtctcggcctcggtcttggcgacctgctgctcgttgagcgccttctgcttgtcgatctcggcggcctgcgcctccgtgtacttcttggtgatggcctcgccgtagcgcacgtcctgcacgctgacctgctcgacggtcaggccgatcttcctccacttcgccgccagcacatcctgcaccgccttcgtgtactcgccgcgattggtgagcatcgtcagggtgtcgaacctccctgactgttcgcgcgccacggaacgcagatcgttgctgatgtagttctgcgtgaacgtctgctgcttgccatactccgagtacaggtattcggccgcgctcggatcaaggctgtagttgacttggatgtcgatgtctgcagaagcgccgctcctgtcgttgacggtgacctgcttgccgaccgcgctgccgccgtcgtacttgtaatcggtgtccttgtagaagttgatgaggttgttacgggtgtcgtatttgatgacgctctgccacggcgtcttccaatggaagcccgcgtcttcggaatgaccggccagactgccgcccatgttgcggatgaccgcgacctcgcccacgtccacggaatacagacatgcgggaatgagcagcagcaatccgacgaggcccggaatgaggccgatgccggcccccttgacgttgttggacagcgcgacgccggtgacggcggcgctgaagagcagcaggatgatggagatgacgaaccagatcatgagggttcctttcagaagataaggccctttccccgtgccgcgtaggcttgaagctgcaacacaaacaatccgctgcatgcggggaaaggaagtattcaaatgggtggagctgcaagctgggcgagctcagcggaaacgaagttcaagcaggctcaggcaagcactagaaatgcctatgagtcacggatgaccgaaggcctagcggacatcgcccaagcgttgttccaaatcgacttacggcttgaccggctcgaaaagaaactggacggtcggggttaagccttgccagtttgcgctcgctgatgacgtcgtggcgtatgtaaaggctttccatgttgagctgtgcgccacgacgctcataggcgttactcatttcgcctccagcagtcggagaacgtcgcgcagctcgcattggacgatcttggtgacgtagacgcatgccttgttgcccaatgcttcaacgatgatgggctgctcaggagtgacctcggcgatatagccggcgtcatgctcgttcaggaacgattgaacggctttgacgtcgccatcgaagctctcgactcgcagaatctcatgccgctcctgatgattcgagcggtctggaatgacgccattctggacggtatcggctttgagtgttccaatgcgctcccaatggccggtaccgtccgcgccatcgccatgtgtctcgaatgcgacagtgaccacaggtttcgggcactcgggacgacggactatgcacgcttgcagtacgtcgctgagcgcgaacagcagggacagcacgccccacaagcccatacgcgcatccctttgcacgacggccaacaccaccatcgacacgccacagagacccagcacgccggcgcagacaatgagggtacggcgcttcagcttgtcgctcatttcgccgcctcttccggttgggggtcgtctgtgggccacgggtcaagagtgcgacccatgaggtaatcaacactcgtattgaaaaagtcagcgagcgccacgtaatcacgcttggtgaagctgcggatgccattgagcttgttggacagtacttgtcgagaaattccgatctcgtcggcgagcgccgactgagtaataccacgtgagctgagcagatcaagcacgatctgcgatgtcttggatttctgtgtttgtaaccgcatgtgattacagatacaccatgagatgacagactcgcaagttatcggcgtgttgactttgtaatcataagtggttatagtgatggcatgaccgaaacaatgacagccccctcggtggcgaccgactatcaagccgtagccatcgggaacatccgaatgatgctcagcctgagagggttgaagcagagtgatcttgctgcctacatgggcaagcatcgtcagaacttgaacaggatgattaacactggtgcacagtggtcgttcaacgacatgtgccgagccgcgcagttcttcggtgtctccgttgacacgctactgcgccctgatctaactcagtcggaacttcgagggaatggaggtttgcctgtcgtcaacgttgacgacttccgcctacgtggcggggcatggaaggccccggctatgattctggccgcctgaccggtcgggatcataacccagaggtccatggttcaaatccatgccccgctaccagtgcctccggtttcacatcaaggaaatcggaggctttttctatatcatccatgttccatcgggtgcgcccactgaacttctgggatagagtcggtgcggcaattcccatagcctgcgccagatccttctgagaggtctgtcgaatggcgataagaaccttcatgttgtatgtaacgcgatcctgaaggctcagctcttgcttctgcgcctttaacgccggcgagaccatcactgcagtcatgtgaactagattagcaatgcatagacttactttcaagtcttggattaggaatttacaaaccatgatattgttacacatatcttttatccatacataaaactgatttgtatataactaatatggagtcgagaatcaaaaccctgatcgtagtacgcggaaggccgcgatcttgtcgaccggctcgacgcctccagtgacgctgaccgccccgaatcccggaaacgacgatgtgcgccacatcgtgctcaggatgatcgacggcaggcattggacggcgattacaaccaaacgcggcaagcgcatccgcatcatatccgtgcgccgatcgcgcaagaacaaggaggcatgccatgaaagcaaaaaatgatgccaaggcgatcaccagcgaccagcttgaggagatgttcgacaacggcgacgacatcctcagctatgtcgatctcggcaatcccgtagtcgaacatcatcccccgctggagaagcgaatcacgctgacgatgcccgcatggacggtcagcgaactggacgaggaagccgccgagctggcaatcagccgcaacgccgtcgtcaatacatgggtcgccgaccggttgcgcaccatgcgacgtcgcgaaaacgcccacgcctgacccatataccattgaggcccatggttcaaatccatgccaaatagaaggctaggaattacaagattcctagccttcctgttctattgcgcctttctcaagtgcctcaaaccatcccccggtctcgctagacaaccttcgccagcggcagcgtcagcgacgggatcggcggcggaaggccagggcaccgatggcggccgcggcggctccggatccgacgacgatgatggcgacgacccccgcaccggtatgagacagcaccggcttctcgggctctggatccgccttcggctcagcgggtggatcatcaggcgcttcgacggttacggtctccccttcgacgccgagctcatgcgaaaccagcacatcaccgtcacgcgagcgaagcgacgctctccaatacaccagtcccgccttcggcgagcgcacctgcggactgacgatcgtctgctcgaacagcgtatggtccacttcggcgcgggcctcgtcaagcagcacgccgttcatgccgggcaccgccccttcctccaccgcctcgtacgccgtgaacgtcacataggccccttcgggcacatcgcccacaatccgcgccgtatcgcggaacggctcatcgacccgcacaatgtccggctccacctgcgtggtcagcgccggcttgcgcggccgtgccacatcccatatgcgcacgcgctcccacgcgtcatcgtatgcgctggacgccggcatcacccggtcatcgccgtcgaagctccaaacgaacacgtaccatccatgcgattcggccacgatgtgcaccggatcgccatgagcgtccggcgccccggcgcccactcggatacgcccgttgaccgccggataatcccacacgccaatcaaccggtgattgctgtcctcggccggcggcgtctccccctgaggccggtacgcctcgtcgccggcggaatcattcggatcgcccgcccaccacacgctcacctgcgccatcgcccggtcagcgccgatgccaagcttgacattgccgtcaaaggatccgtgatcatcggggaatccgtcgaccgtaatggtgtcgctcagttcggaaccaaccacgccggtatgctccgtgaccgtagattccacactcacccgagcacggttcgaattcgtctccgtgtattccaggaacccgctgaccacatccttacctatatattgtcgcgcagtatcgctcaacttctcgacttcgaacgcccacacccatgtgccgaatcctccacctcgcggcgcctcatacgccgcgtcgccgcccggctcggccgttgctctcacatccacgcgctgcccgggagcagtgaacgacgcctcgccataagcggacggccggaatcccattgtgcccagcctcgcgatgaactccttcgccgtctcgtcggcaccaggcatgaccggctcggacagatcgcccacgacgagcccgtcgaaataccatccggacgcccgcaactccaatccggacgcccaggaatcgccgtcatccaccccggatgtgacggtatccacgaccggctgcccggcgtcgaccaccttggccgcgacggcggtgcccagtgtgggcacgaactccttgcggaccgagaaattcaccgccttgccgctcacctgcgaagagccgccgtaacgcaccagatcctggcctcccgcgactgcgaacacgtccacctgcttgcggtcatatgccacactcgccttcacttcaccctcgccggtcgccttccacgagtacacgatcggctccgccccggatatcccggtcaccgtcgcgctcccgttcgcgaacaccgccggaccgttcagcgtcgcggcgtatctgatcccggcgatcgtcttcccctgcgcattggtcaccgacaccgtgacacgcccggtccgcgtgccttcggcgtatgtacgcgtcaccgtcgcattcgccggggcgttggatcccgcctcctcccacatctgctctaccttgcgccgcagcgtcggattgtcgcgcatgacggacacgcgccgggatttccacgtgtccggcttcaggtccagcagatcatgggccagcaccgcgattgccgcatgctccgcggccgtcccgtcgcgataatggtccatcagccagccgagccggcgcgcggtgtcgtcgtcgcgcagcttgacgctctcccccagctggtattcgacgcgttcgtcagcctcgatgcagtaatagttgttcgtcgaatccttcgccatgacgccgatgacctgctcgccgccatgctcatagcgcagaaacgtgccggcatccgccctgctcaacgtcaccgccgcggccggcatggcggcaaacaccagcgaggccaccaatgcgagagccatgacggccgcgacccccagcgcggactgacatcgcctgaatacaaccatgttcatgatattcccttcctgaaatcccgccgcgtccacgatgggcggttgatgacaccatgccatgccggacgccgtcggccaccggatttcaggcaatgtggtcgaaggctatcccccttcggcgtgttgtggataactccccacggcagttatccacatttggcggttctcggcatataagacagagggttatccacaatcgcccattggccatcagccgtatacaatgggcggtatggcagaagaaaagaaaggcgcgtcagcgcttagcagtagttcatctcgatcagccacatcgcattcggacgacaagaccgaagcgaaatccgcaacccgtcgcacttcgtcgggcaagcagtccacatcacgtaccacctcgccgcgcaagcgcacgacggccaagacgcctcgcgcctccagaacgacgaaagccgccactgcggccgccgtcgccaacggtgaggtccccgcgcagtccattcccgtcgcagacccgtcacagttcggacgcatcgccgtcatggacgtgacgccgaacgaggaatccggccgtttccccgcccgtgtcgagctgggcgaaccgttcaaggtcaccgcgcaggtcttcatcgaaggccgcaccaaagtcggtgccaccgccatcgtgcgcaaccaccgcggcaaggagatgcagcgtctgccgatgacctgcaccaaccccggcctcgaccgctgggaggtcatgctcacctgcggcgagcacagcgacgtcaagccgtggcagcccgaattcgccgccatcaagcgccagctgggcgaatggagcgtcaccgtcgaaggatgggaggacacctacaagtcctggctgcatgacgcggccatcaaagtcaaggtcaacgacgacgtcgagaacgcccttgaatccggcgcgcaattgctggaacgctgggcgaagaccgccgacgccaagctgagcgccgcgcagcgaaagatgctcgtcgccgctgccgccaccatgaaggacacatcgcttacacccgaggaccgtctcgccgcggcgaccagcgaaccggtcgcccagctgcatctgaccaacccgctgcgcgacggcgtctcgcccagccagccccagcgtttcctcgtgcagcgtccggaatccagcttcgccgcatggtaccagttcttcccgcgttccgagggcgcctacgtcgacccggagaccggcaagatcgtccagggcacgctcaagacgtcggtgtccggcctggaacgcgccaaggccgaaggcttcgacatcgtgtacctgccgccgatcttcccgatcggcaagacgaaccgcaagggacgcaacaacgcgctggaggccggccccgacgatccgggctcgccgttcggcatcggttccgagctgggcgggcatgacaccgtcgacccgctgctcggcaacatggacgatttcaaggcgctcgtcgccaaggcccacgagctgggtctggaaatcgcgctcgacttcgcgctgcagtgctcgcccgaccacccgtgggtcaagcagcacccggattggttccgccacaagccggacggctccatcgccttcgcggagaacccgccgaagaagtatcaggacatctacccgatcgacttcaacgccgacatgcccggcatcgagaaggaagtcgagcgtgttctcgaactgtggatcaacgccggcgtgacgatcttccgcatcgacaacccccacaccaagccggtgcgcttctggcaggacgtcatcgcggcggtcaccaagaagcacccggagatcctgttcctggccgaggcgttcacccgcccgggcatgatgcgcgcgctgagctacgttggattcacgcagtcgcactgctacttcccgtggcgcaacaccaaggaggagctgggcaagtacctggagaccacgaacggcgacgacggctactaccagcacaacacgttctggcccaccacgccggacatcctcaccgcctacgtgcgcgacaacggcatcgccggccacgctgtgcgcgcggtgctcgccgcgatgggcagcccgagctggggcatctacaacggcttcgagctgatcgagaacaagcagcgccccggtttcgaggagcagatcgacaacgagaagtacgaggtcaaggtgcgcgactggtcggccgccgacaagtacggcatcgccgagctgctgaccaacctgaaccgcgtccgccgcgagcatccgaaggtgttcagctaccacaacctgacggtgctggaatcctccgacccgaacatcctcgcattcgcccgccacacaccggccgaactgaccggcaccgacaagccggagacgctgatcgtggtggtgaacctggacggtcacgaggcgcatcaggccatggtgcatctggagctgcccgactatggcatcgatccgaagtggggtgcgcacatacacgacgagctgaccggccgcgacttcgcgtggagctgggacaacttcgtctcgttggcaccgtgggccgatgtggcgcacatcttcaccgtggtgcatgaggactgagaacgcatgagggacgcgcggccggcaggctgaccgtttcggtgatggggcccgtcgtttcggcgacgggccccatctgcgtttttgggcgaaatcgtggcgcttccggcgtacgacggggtattgtggagtgtgattatgtcaatcgactctaaggagcaatatcatggcagaaacgttcaacgttctcgttgaaatcccgcgtggttccaagaacaagtacgaagtcgaccaggagaccggccgcatcaccctggaccgtgagctgttcaccgccatgggctacccggacgactacggctacatcgaaggcacgctcggcgaggacggcgatccgctggacgcgctggtgatggtcaagaactccgtgttcccgggctgcgtcatcgagtgccgcgccgtcggcctgtaccacatggaagacgaagagggcggcgacgacaaggtgctgtgcgtgcccgccgacgtgcgctacgacgacatcaaggacgtcaacgacgtcaacgagtaccacctcaaggagatcaagcacttcttcgagcagtacaaggccctggaacccaacaaggaagtcctccccggcgactactggaccggtgcggacgttgccgagaaggaaatcaaggaggcgcgcgagcgtctcgcgaacgcgtcgaagtgatttgcttcaggacagcccggtaagctgtccggcggcaacgtgcgaggacgcgacagcgaccgagccaaccatgagccggccgaaggccgtcctcaattgcaggaccgttgccgagaaggaaatcaaggaggcgcgcgagcgtctcgcgaacgcgtcgaagtgatttgcttcgcttccgcctccgctggcgggggctgtcagccatcggctgactgggggcttaagtgccacgaccacccccagtcgctccgtgacagcccccgccagcgggggcattatattatcttatcgaccacagctttctggctcgcctacaaacagattccgctgtttgcttcacggctcgtcccgccagcggggcgatgttgtgttacagtagtgccttgtagttttcacgacttgcgaacagcattcgcttggattcaaagccggcttgctggcccggcagttctcaaagtccgtgccccctaggcgtaggcggtttatccgtcgaggcccatcccccggggaagccggcgggatgaacctttatgttccagctatgattgagatactgcttatttccgtatccgtcgccatggacgctttcgccgtctcgatcggaaaggggttgaccgtcacgcgcgtgcggccggtcgacgtcatcaagaccgcattgtggttcggcggcttccaggcattgttcccgcttctgggctttttcgcggccaacacgttcagcaaatacgtcaccgcggttgatcattggatcattttcgcgctgctcgcgttcatcggcggcaacatgatccgcgaggcgttcggcgaggaagaggagaacagccgggagacggcccagttcgactggcgccatatgctgccgctcgcggtggcgtgtagcatcgatgcgttcgccgtcggcgtgagcttcgcattcatgcaggtcaacatctggttttcggtgatcgtcatcggcgtggtgaccggcgcgttctccgctgccggcctgtatatcggccgcgtgtttggcgcacgctggcagaagccggcgcagatcgccggcggtgccgtgctcgtgctcatcggtcttaaggtgctgcttgagcaccttggcttcatagcatggtaacgcaacgagactgaaaatatgcggctgtcagcgtccgtgttcgggactttccgtgtttggatattgccgggacgatgaggccatcgtcttgccggtgcggatttcgtcgtagcgcccaaggggacatgtcttccccgcgtgtgcgtcattgcgcgcagccgaggtcctcgacccaggctcctccatgcgagccggtcgccggagggcggtccgtggcgaccgtctcgatcaggccgctcatgatggcgacctttcgccgacgaactccaccgaccgaaagaaagaagcgcgttggctgaatgacgggtacggactccctattgccctgcttggttcttgacgaaaacaaagcccaacaggcgcacaccctcttcatacccacatgcgggaaagccccggcaacgatgccgaatcccgactccccgcatcgcatactggcgaagaccaatattccccgccgaagaaaaccgtcaaatatcagaagatcagctgcatgacgaatgacgcggcgaacacgagcagaccgctgagcatcaccggcagcagcccgatacccagccacggcgccggagcggccggatccggatccgcctcgcggctccacgacaccgagcatacggcgaacagcaccgccactaccacgaacgccgcggccacgatgatgaatctcgtcagcagcccgttatccggcgacgcggagcccatgtcgatgagatcgggcacaaaacaccatcccgcggcgctgacggagaccacggcccccgtcatgcagtgcgacagcgcgcgaatcaggtggctgcgctccgcgcgcaccatctgccggccgaacgcgatgatcgtcgccgcgatcagcagtatcgcgaagcacgccgcccaacgcaccagctgatacatcaccagacgtccatcatccgcaagacgcccgccctcgtacgcggggtaaaacagctggctggccaacgacgtccgcgcgcacagaatcgacagcacgcccgcaaccgcgccgatcaggcggtcggcaatgccggcacggaacggccacccaacctggaatagcacgagcagcaccacggcgagcgcgatcgcaaccccttgcgccacaccgccctggttcccgaacgtgaactccagcacgcccgtcacgccgaatagcaccacgtatgccaccgcctgaaccgcaagtacgcggccaatcgagcttccggtacgctgttcgccgtcgcccatcgtcatcacactccacaaatcgcaatccgcggcagcctcgcgaccgccattccactaactctagcctagcgtcggctgtccacattatgcgcctacaatatgaccactaaccatatgggtactacggttatccatattcaggaaaggggaagcggttgactgatttgacgctgatgacattcgcggacgaccctgccaccgtgcttccctcacttgcactgctgtcccaccgcgtgcgcgtgctgccgatggacgccgcaagcctggtgaagatgccggagaacaccgtgctcttcctcgacgcccgggatgacctcgccacggcgaagacgctgtgccggctgattcacgcttccggcctggccacgccgatcgtgctgatcctcaccgagggcgggttcaccgtcgtcaactcgcagtggggcatcgccgatgtggtggtggcctccgcttcacccgccgaggtggaggggcgcctgcgactggtgtcggaacgcggcaatgcgccgatcacaggcgccagcaccacggacgattcggagcgcaccgaggatggccagatccgttccggcgatctcgtggtggataccaacggctacacggcatcgctgcacggcaggcccatcgatctggcgtacaaggaattcgaactgctgaaatatctggtgcagcatcccggccgtgtgttcacgcgcgcgcagctcctgcaggaggtgtggggatacgactattacggcggcacccgtaccgtcgacgtgcacatccgtcgcctgcgcgccaagctgggcggcgaatacgaacatctgatcggtaccgtgcgcaacgtcggctaccgtttcgacccgcccgagggcgagggagacaagtcactcgcggctccggcggcttccgacgacactgacgccgacgcccagtaagaccggcacatcatgccacgcgaatccaaacgggcacgcatccagcggatgcacgaggagtacgcattgctcgtcgaggcgttcccgcacccgaaatgcgccttggatttcacttctcccctgcaattgctgatagccaccgtgctcagcgcccagacgaccgacaagcgggtgaacaccgtcacgcccgagctgttctcgcgtttccccgatgccgcatccctggccgcagcgaatccgcaggacgtcgaagacatcatccacccgctcggcttctaccgttccaagaccaagcatctgctgggattggccgtagtgctgcgtgaccgtttcggtggcgaggtccccgatacgatggactcgctggtgacgttgcctggcgtcggccgcaagacggccaacgtggtgctgggcaacgcgttcggcgtgcccggattccccgtcgatacgcatgtgatccgcgtgacgggacggctgcgctggcgcggcgactggaactcgtccagtcccgatccggtgcatatcgagcgggagatctgctcgtatttcgagccgtcgcagtggaccgacctgtcgcaccggctgattctgcatggacgcgccacctgtcacgcgcgcaaacccgattgcgaggtgtgcccacttcatgacacctgcccgagctcactgatatagaccaagcggacggacccggccggtatcccacgcatcagggatcccccgtcgacccgtttaccccgggcattacactcggagccatgcagcacagcgcacggcatacctccatcagcagttcggcgaagtccgccatcatctttgtcatcgtcgcgggggtgctcggctgcgccgtctggctgggctggtccctgctgcaccgcaaatacacgctgcccaccttcagcggcctgcaatcaagcgtcaaagtgagcgtcggcatcaccggcgccccggaatcattggatatccggacaaccgacgacgattcgctcgaccgcgtccttctcggcaacgtctatgagacgctgctgaagcgcgatgacaacaacaagatccagccgtcgctcgcctcctcgtggaaggtgtccgaagacggcaccacctaccgcttcaacctgcgcagcggcgcgacgttcgccgacggcaccacgatcacctcgtccgacgccgtatggtccctgcagcagatcatcaccaagaagtatgtcggcagcgacgaactgtccgcgctgtccaacgtggagtcggacggcaacagcacgctggtgctgcgtcttcgcgaacccgacccgcggctgctcgccaagctcaccacgcgcatcggcatcgtctacaaccagcgtgagaacatcgactacgcaaagcaggccagcgggtccggaccgttcaccgtctcccaatggcaatccggcaagcagctgacgctgagccgcaacgaccactattggggtagcaagtccaaggccaagaccgtcaccgtcaacttcgcggccgacaccacggagctggccaaggctctgaacaacggccagatcgacgcggccgtcgcgctggatcagtccgccgccgacgcggtgaaagatgatggcatcgtcaagaagcagggcgtcagcaaccgcaaggtcgtgctcgccttcagcaacaacacgcagtccatcctttccgacaagcggttccggcaggcagtgcgctacctcatcgacaagaacgcgatgaccgaggcgctgggcggcggcacggtcatgaccgggccgctgtcaccgctcgacgacggatatcagaagacggatgagacgttcggccacgacatcggcaagggcaacgacctgatcaaatacttccgtttccgcgtctccagacgaccgctgaccttcgtctatccgaaggaatacggctcccagatcggcgaacaggtcaagcagacgatgtacgccgaacccgcgtattcggacgtgtccgtgtcgatggtcgacgatgccacatggagcaagaccgtgacgcaggaccgccaatacgacttcacgatctacgagaccgacggcgaggacgatctggacctcctgatggacagcaactcgtacatcggcttcgtcagcaccgactcgcagaacgcgtggagcaaggcgctgaaatccttcagcagcgacgactacgcgaagaacttccagtcgttcatcggcacgctcgacgacgattcgccggtggactggatctgcacgcgcaagccaatcagcgcgtaccgcagcaacatcaccggagtgcccgtcaacatgacctacacgcagctgccgctcgccgatatgaccaccacggactgattcgggggtccatgcgcccggacccgcccgccggcggacgcagccgcgcggctgttgtcacgattgctttctagactgtcgcttatgaccgaagagcaggataacagcatcatcaaggcacacctcaccccgttgcccgacaaggtcggcgtcgacgggctcgaagacaagtggcgcggtgaatgggacgaggacggagtctacaagttccagggaacccgcgaccgcaaggccgtctattccatcgacaccccgccgcccaccgtatccggccatctgcatgtcggccacgtgttcagctacacgcacaccgacgtgatcgcgcgattcaagcgcatgcaaggctatgacgtgttctacccgatgggctgggacgacaatggcctgcccaccgagcgccgcgtgcagaactactacggcgtgcgcgtggacacgtcgctcaagtacgatcctgatttcaagccgccgttcgagggcaccgacggcaagaagatcgacgccaaggatcaggtgccggtctcgcgcaagaacttcatcgagctgtgcgagaagctcaccgcccaggacgagaagcagttcgaggcgctatggcgttccctcggcctgtcgatcgactggtcgcagacctaccacaccatcggcgagcacccgcagcgcgtggcgcagaaggcgttcctgcgcaacctcgcgcgcggcgaggcgtatcagcaggacgcgcccggcctgtgggacgtgacgttccagaccgccgtggcccaggccgagctggaaagccgcgaataccccggcttctaccacaaggtcgccttccgtttcgaggacggcacgccgatctacatcgagaccacccgtcccgagctgctcgcggcctgcacctcgctgatcgcgaacccgaacgacgagcgttacaagcagtatttcggccagtccgtgtactccccgctgttcaaggtcaaggtgccgattctcgcgcacccggccgccgagatggacaagggcgccggcatcgcgatgtgctgcaccttcggtgacgtgaccgatgtcgagtggtggcgcgacctgaagctgccgacccgcccgatcatccagcgcaacggccgcatcgtcatggacaccccggattggatcaccgacccggccggccgtgagatgttcgccgcgaccgccggcaagaccacgttctccgcccgcaagatcatcgtcgacgcgctgcgcgaggccggcgacctggacggcgagccgaccccgaccaagcgtatgacgaacttctacgagaagggcgacaagccgctggagatcgtcacctcccgtcagtggtacctgaagaacggtggcaccgacgccaaactgaacgccgagctgatcgagcgcggcaaggagctcaacttccaccccgatttcatgcgcgtgcgctacgagaactgggtgcatggcctcaacggcgactggctgatctcccgccagcgcttcttcggcgtgccgttcccgctgtggtacccggtcaaggcttccggcgagccggattacgatcatccgatcactccgagcgaggaccgtctgccgatcgacccgaccaatgacgtgccggaaggctacgacgagtcccagcgcgatgtgcccggcggcttcaccgccgagccggacatcatggacacgtgggcgacgtcctcgctcaccccgcagatcgtgacccgctgggaggagccggacgaggcttccaaggcgctgttcaaggccacgttcccgatggatctgcgtccgcagggtcaggacatcatccgcacctggctgttctcgaccgtggaccgcgcccatctggagaacaagtgcctgccgtgggcgcacgccacgctgtcgggctggatcctggaccccgaccacaagaagatgtcgaagtccaagggcaacgtcgtcgtgccgaacaagccgatcgagcagttcggcgccgacgcggtgcgctactgggccgccgcggcccgtctcggcctcgacgccacgtatgacgaaggccagatgaagatcggccgccgtcttgcgatcaagctgctcaacgcctcgaagttcgcgctggccatcggtcgcgaggacgagaaccatcatgtgggcgagacggccgacgccgtctggaacccggccgatgtgaccgagccgctcgaccgcgccgtgatggcgaagctggcgctggtgatccgccaggccaccgacgcgctgaacgcctacgagcattccaaggcgctggaagtcatcgagagcttcttctggcagttctgcgacgactacatcgaactggtcaagaaccgcgcgtacggcactgccgacgcgcacggcaaggtgccgagcgacgcggccgtgaagtccgcgcgcacgacgctgggcctaggcctggacgccttcgcgcgcctgctggccccgtacctgccgttcgccaccgaagaggtgtggagctggatgcacaccggcgaggggtccgtgcaccgcgccgcctggccgaaggccgacatctatgccgcagcagccaccggtgcctccccggagacgctggcttgggccggcaaggccgtcgagcagctgcgcaagatcaagtccgaggccaaggtctcgatgaagaccccgatcctgtcggtgacgctggccgccgtcaaggacggcatcgacgccatcaagtccgctctggacgacgtggcgcaggccggccgcgtgatcggcaagttcgatctcgccgaaaagcacgccgaggaggccgcggccgaaggcgagggcgacgataccgtcgtcatcgatgccagcgagctcggtgagccgccggcgaagaaggccaagaagtaacctgcttctcactaacggaaacggccccctcggatccacgagggggccgttttgcatccacggcatcgtgacggcggcatgccggccgcgcgccgtgcgccgtatgccgcgcacccgtcacacggctggcatgatgatcagcagacgcagatcctcggtatgccggttccagtcggatagcacgtcgtaactgtgccgcccgtcggcgatgcagtggtcggaatatgcgttggcgccgtcgcacgacaaccgtctcaacgcggcagcgagacgcgcgaccggtttgccggcgacggctgcgctgccgccgccgctgccgcggccggccaacgattgcgcggcctgaaccagcatgtcggagacgtcaccaatcgccactgtctcgtcgatgagctcagacgacgtgctctgcaacggcgatctggggttcatgccggcgatgccgtataccggcgagaacttcggaaccgacgccgacttcgaaccggatgccgtgcccgccgccgaagacgagccgctgccgctggcgttgccatccttgccgtcgccgctatccttgttgccgcccttgccgtcgctcttggcagcgccgccgagcatgcccaggccgctggcgttgcccatcacatcgccgatactcatgcctgactgcgagtcgtcatcggtcttgccactggccaacgcctgcgccttgcgctcggcctcctcacgctcctgcctgctgacggcggccagccgcttgcgctcggccttcgccgccatcgacgtcgtgtcggaaccggcccagccgtaacgcacccggtccgcagccgcatcgccaccttgcgcatcgccggtggaggcggtgctggtcagtgcgccggcgaactgtatgctgatctgctgcaatgcgttcgccgcgcccgtatgttcggatgccgccgccaaggcgtccatcgccgactgcactttctgattgtcgtcctgaaggtcggcgctggtggagaactcctcgttggcggcgtcaatcgcctgttgctgataccgcgcggctcccgccgacgtgcctccggtcagctcgctcagatgcttggtgtacacgtcggtgtaggccatcgaataggggatcatcgcgttggacagctggctctgcccggccttgtacgccgtcgcgccctcggtggactcctgggccatggtctggctgatctcatcggcgagtcccgacgtgccgcgctgacggatgcgctgaatcaggtcgtctatggcatgtactgcgccgtcgtgctcatgcgcggcactgaccgcgttgaccgcgttggcgaggtcggtgaccgcctgcgccatcggggtgtcgccggtcagttcgccggctgtgccgatcagcgcctgcatctgcgtggatgagccgatgctgccggacagatgggtcgtgtacgaccccacgtaatgcgccatatacgacgagaacgcagccttgtgcgctgcggttttctccttgatcgccttctcgccgagcttctgctcgcgatcgcgcatggaggtcagctgttcgattagtttgtggtccgacgcggaaccggtgacgaccagcgtgttgaccagtgcgtcagcacggtcggagacagccgtgacctcgtcgacgaacgacgccgtgtcatcggcctgcacggtcacgaacgccagttggctcatcgagaagttcttcgcgttcatatagcagtcgaacaccgtgcgtttgccgggctccccgacgccgctgacaagcatgtcggatccttgcgtcgtcagcgtcatgccgtctccgacggtgatatcgtcggagacggaagacggtacggtgaacgccaccacgggaatgctgttctccgcgtagccgttggacacggccgcattgggctccacggtgatacggatatcgaccagtccgctggcaccggcgatctgggacggcttcacctgcgggccgttcaggccgtaggcgatgctgaccgaccacggcaacacgcgttgcccggccttcacccgctcctgtgtggtcttgccggtttccacagccttgtattccgccgcgagcatggaaccgtcaccgctgttgccggccacgtagtcgacgatatcgccgccgcgggagaccgtgaactggttggtgacgtacaggcgtcccggaaccccgtccgagttggcgagagacatgacattctgcgtcttggaatacccggcatctccttcggccggattggcaccggccgtgaccggcccgcccgccgaaggggccagagtcagggccagcgtggcggcagccgccaggcttcgcgtcatcaccccggtcatatgcgccatcgtcgctccccctttcattcatcatcacgcggcccgcatgccgaatacaggcatgcatatgcacgccaccgacgatgcgggcagagcggcaaatctccgccgatcaggcgaacacgtcgagcacgccgggatcccctcccgcgtcggcgatgcgctgatgccgcttcttggcctcggccaccacgaattcccggtacatttccgcgatgtcgggatcgagtccggcgtcgatggcgatgcggtgcagccgttcgatctggtagtcctcgcgcttgtaatccgccggcgcgaatccggcccgcgccttgagtacgcccacctgggacgtgtacttgaaccgctccgcgagcaaggagacgatggccgtgtccacattgtcgatggactgcctgagcgccttgatcttggccacggtgaccgcggtctgcggatcatgccgtgcggtgtcggcgtcgatgacggtttcggatccgccgcctcccacctcgcgggatgacggcttcgcccaatcgctgttctcgggttcactcatactgcctaccatagcgcgtgggccgaacccgggccgtcggctattcctcaacgatggaacgatatggtcaatgccggccgggatgtctaacgcctacggcgaatggcatccgtcagaaatacgtctgcaggatcaccgtgctttcggtgctgaccggcaccgtccgatggatgcggttcagcagttcctccagtttgctgggtgacgacacgcgaaccaccagcatgaagctgggcgcgccggctatggagtagcaggacaccacgccttccagctcatgcagcttgccggggatatcggcctcctgcgagtagtccagcggcgtgacggacacgaacgcgctgatcggcagaccgcgcagctcatagtcgagcaccgcgcgataccccttgatgactcctcgcttctccagcttctgcacgcgtgactgcaccgcggacaccgacaggccggacagccgggacagctgagccagcgtggcccgcccgtcctcctccaacgcatcgaggatggactcgtccgtggcgtcgagcatggcggagccctccggcctgatctccaccttgcgcgatgccgcgtccggttcctcgtcattgcgcgtattcgcctgtgccatcacgtcctcccgggtcatacggttcgccgcaacctgcatgtggagcggttccggcgcgaacttgtctgatgacagcttatcgcgatgtcaatccagtattattccattgatttcttactgttatttacgaaatatatagtaataattactgtttttcaatgtactactgtatattttatattcttgttcatgattgaaaggtgacaccatgtccatgcccgcactttcgcagcactcgctcagcgtcccccgttccggcatccgggacgtattcgaccgggtcgagcacgtgcctgacgcaatctcgctgtgcgtgggcgaacccagtgccaccgcggcgccgcatatcgtggaagccgcatgccgatcgatccgcgaaggacacaccacatacacgaacgtgctcggcatcgagccgttccgcgaggccgtggcggcatactccgaaaaggtgaaggggctgcgctacgacgtcgacaccgagatacaggcggtcgacggcgcgaccatcggcctgttcctggcgatgaaggcgctgcttgacgccggcgacgaagtgatccttccgtcgccgtacttcacctcgtacgacgcggaggccctgatgtgcggcggagtgccggtgcccgtcgcgctcaaaccggaacaccagatgcggctgaacgccgacgatatcgaagcagcaatcacgccgcgcacgaaggccgttcttctcaactcccccggcaacccgtccggagccgtcacgccgctatccgagctggagcgcatcgccgacgtctgcatccggcatgacatctgggcgatctccgacgaggtgtatcacccgttcgtcttcgacggctccgcgtcaatcgcgccctccatcgccgccgtcgacggcatgcacgagcgcacggtcgtcgtcgaaagcctgtccaagaccttcgccatgaccggctggcgcatcggctacctgctcggccccgagccgctgattgaacagaccagcaagctcgccgagctgatgcactcatcggtcaactcgacggcgcaatatgccgccgtggccgcgttgaccggcccgcaggagcatgtcacggccatgcgcgaggaatactgcgccaagcggcagatcgtgctggacgagctcgacggctgcaccgcgctgcgcctgatcgagccgcagggcgcgttctacgcgttcgtggacgtgcgagcctgcggcatggattgcgacaggttcagccgtatgctgctggacgaggagcacgtcgccgtggtgccgggaacggccttcggcagtgagggggccggattcgtgaggctttcctacgtcggggacgggcgtgagctgcgcgagggcgtgcgacggatgcgcgtgttcgccgaacgtcacgtcgaccccgcgctgggccgccatacgcccggataccatcatctgcagatcatggcctgaaagcaggccggatatagacgggagcccccgcttcaatgccgaagcgggggctcctctcgttcaggccgtcgtgccggagcccggcagacggcagccggatcagttgccgttgaccgggttgctgttgctctgctggataatggcggcgaggaagtcgcggttcgtcgcggtcttcttcaggcgcggcaccagcgtctggtatgcctgctcgggctccatgccgccgagcagacggcgcagacgatagataatcggcagttcctgcggcgaggtgatgagctcttcgcggcgggtgccggaggcgttcacgtcgatggccgggaacaggcgcttgtcggccagctcgcggctcagacgcagttccatgttgccggtgcccttgaactcctcgaagatcacctcgtccatcttggagccggtctccaccagcgcggaggagatgatggtcagcgagccgccgttttcgatgttgcgggcggcgccgaagaacttcttcggcgggtagagcgcctgggcgtccacgccaccggacaggatgcggccggaggccggcgcggcgatgttgtaggcgcgggcgagacgggtcatcgagtcaagcaacaccaccacgtcctgaccgagctccacgagtcgcttggcgcgctcgatggcgagctcggcgacggtggtgtggtcggaggccgggcggtcgaaggtcgaggagatgacctcgccggccacggtgcgctccatgtcggtgacttcttcggggcgttcgtccaccagcacgaccatcaggtgcacttcggggttgttcgtggtgatcgcgttggcgatgttctgcagcgtgatcgtcttgccggccttcggcggggagacgatcaggccgcgctggcccttgccgatcggggaaacgatgtccatgatgcggccggtgagcttgttcggcgtggtctcctgcttgaggcgctcctgcgggtacagcggggtgagcttggcgaactgcgggcggttggccgcctcttcgacgctcatgccgttgatggtgtcgacggactgcagcggcacgaacttctggcgctggttgcggcggtcgccctcgcgcggcgcgcggatggatccggtcacggcgtcgcccttgcgcaggccgtacttcttgacctgacccatcgagatgtacacgtcgttcgggccgggcaggtagccggaagtgcgcacgaaggcgtaggagtcgagcacgtcgacgatgccggcgaccggcacgagatcgtcgccgccgttgtcctgatggtcggagatgcgcacttcgcgggtgtcgcgatcatcgtagtcgcggccgccacggtcgcggccgcgcatgcggcgctggcgacggtcgttgcggtcgttaccgcggtcgccacggtcattgcgatcgccgccgcggtcgccgcggtcggaacggtcagcgcggtcgctacggttgcggcgggtgaattcgcgctcgtcgtcatctcgattatcacggtcaccacgggtgccgcgggcggcgtccgcattggcgttctgtaccggaagcgtggcgagaatatcgtcgaggtcgcggacggtgtcgttctgctggtcgcgctcgcgcggttcgatggtacggcgacgacgacgcatcatgccggaatcagccgcatcatcgcgatgacgcggctgatcgtccgccggcgcgatgtcaagttcatcaaacagatcggcagccacctggcccgcctttgcatcgtcgcgggtgcgacggcgaggagccgcggcgcggtcgtccttgctgtcggattcggcggccttctggcgggagatacgcggcgtgcgggtcgaggctgcatcgggctcgggcagagacgcgaccagtccggccaccgcatcatccgccgctgacaccggtgcacttcccttgggctccgccttgggagcctgttccggagtctgcgcggcctgtgcagcgggctgcgtctgctgggtcggcttgcttgcggcgcccttcaccggtcgcacggtaacgcccgccggcgcctcgccgcctgatcgtgcagcctgcagggtggcgaccaattccggcttgcgcatcgtcgacgtaccgcgcagacccatttgcttggcgagctccttgagctcgatcagcttcataccttcaagattctggctagttgccactcgtttgcctttccttagcagaccgtattgcaccggtccctgcactaagaatgattgcggtcttgccgctttgaacgtccgacgcactccatgcgtttcggactttccatactgtataacgggctggagaccaatgcaaaaacggacgccgagtcgcagacataaacaaatgcccccgctggcgggggcgatatctggtgtgggttacttttgttcgtggtaggacttatccgtgttcacggaccacacgttctgcttcgaggtcttgccggacttgatgttggcgacggcctcgatggcggtggccatggagtggtccatgttgttgtagcggtgctggccgttgcggccgacgcagtaaaggttgccgaaggagtcgaggtattcgacgagttcggacatctgggcataggtgtcgaagtaggcgggatacgcctttttgacacgttcgcgatgggagtcgaggacatcctgcgggccgttgatgacacgcatgcgggtcagttcggaaatggcgaacttggtggcctcgacgtcggtcatgttccagaaatcgtcaccctcgttgcagaagtattcgaggccgatccagacggtatcgtcgacatccttgacaaggtaggggctccagttgttgaagatctggagacgaccgaccttgtaaccgggatcctgcacgtagatccagcaatcgggcacgatgggcgggttgccgagcgtggggatgtcggtggtgttcttgaggcgcatgtgcttgacgagcagtccgacggtgacgaaatcacggtagggcaggccgttggcgatgtgggtcatgtcctgcgggacaggcgccgaagacgcttcggcgtcatcgtcatgagacgccgcatcgatggcgttgacgaggtccttgacgggcatggacgagatgaactggtcggcgtgcagttcggtgcgcttgccgtccgaggactcgtagaccacggattcgatacggccctgtgcctgacgaatctcgacgaccttggcatcggtgatgacggtggcaccggcgtcgacgcaccggcgttccacggtctcccagagctggccggggccgagcttggggtaccagaactcctcgatgagcgacgtttcgacctcacccttgcgcttcttggggctgagcttgcggaaggcgttcttgagaacgccgaggatgctgaggcccttgacgcgctgggcaccccaatcggcggagatctgcgagggatgacgcccccacagcttctcggtgtagccctcgaagaacatggagtagagcttgcggccgaaccggttgatgtagaagttctccagactggtctccggcagcttatggaacatggacttgaggtagctgaaacccgcgaccatggtgagcttgaagcccatcgccttgaaggtgttggcggacagggagatcgggtagtcgaagaaccggcggttccagtagatgcgggagacgcggtggcgcttgagcatcacctggtcggtggtttcggggtcgggaccgcccggctccatgtcgtgctcacgaccgagtttcttgtcgtcatagctgggggcgccctgcagcggcagcacgtccttccaccagtccatgatccggtcgtccttggagaagaagcggtgaccgccgatatccatgcggttgccgttgtgcttgacggtacgcgaaatgccgccgaactcctgcgtttcttcgagtacggtcacatcgtatgtgtcggagccgccgttgttgacgaactcccatgctgcggtcaggccagccgggccgccgccgatgatcaccacagattgcttctgcgtcacgtgaggtctccttatcgctgaatcagagacagtatatatgaaccgctggaaacgcacgccgattttgttgttttgcttacaaaaaccttccgtcgccatacacgagaagccgcgtatcgcaacgaaaacgagagcgggaaacggcgacgtgccggtttggggcgcacacggcaccggcagatgacggcggacggccgaccgcagtcggcctgtaatcagccggtccgaccgtcagcgcctcaattcatatcgtcggggatgtcgatatcggttttctgcacttcctcgacattcacgtccttgaacgtgacgatgcgcacgttcttgacgaaacgcgacgaccggtacacatcccacacccatgcgtcggtgagctgcacgtcgaaatacacgtcctgaccggcggaacgcacattgaaatcgaccttgttcgccagataaaaacgccgttcggtctccaccacgtaggtgaacagcttgatgacgtcgcgatactccttgtacagggcgagttccgcgtcggtttcgtaattgtcaagatcctcggcactcattcgtcatcctccatatcacgtttacggccacgtccgaggatacgccaccaagcttccttcgaaggtttgcgttcgccctgcccatacggccaggtgctttcctcgcccggcgcggccaattcatcgtcattgtgcgcttccggcactcgggctgcggcgactttctcgattcggggcgcctgttcggcatccgcactctcctcgaccgcggcgggctccggcgcgggctcggcctgcgcggcgatgttcttcctgatggcgatcgagtgctcacgggcgctcatcgcctcctgcacaccgggattgtcctcaatcacgtgcatgccgaacgcgtcgagagagcggatgggatcatactcgtccaccagcgtgtccatgacaatcagatcctggtatttgttgttctccgcatcccacagagcgtcgcgcgaggcgccggacggctcgaagccgagcgactggtagacggagcacgaacgcgagttctgctcgggcaccgccacccagatgcggtgcatgcccaggccggccggttctggcgcgaaaccgtacgtcatgactcgcggcatcaggtcgcgcgagtagccgcgcccgcggtagtcacggcccagcaccacctgaatgcgggcggagcgcgaccagccatcgatgtcgatcaggaaaatcatgccgatgacgttgtctgtcgactgcgcgtcgatttcgccgtcctcgtcatggtcggcgtcggtcagtaccgcccatgcgatggtgcggcgggactccggatcgcctacgcccgactcgtcgggcttctgcccgttcgcccacgccaccgagcgtctcacccacgtgtgtacgacggcgcgttccgcctgagcgtccttgccggtgatcttggaggcgccatagtaggcgtccagctcatccatgcgcggcaggtcgtcgacgctggccgggcgcaggtgcaccatctcccccttgatcggcggtatggtgatctgcgagggcagctcacgggatacgtcctgatcgagcggtaatgcggcattttcagacattcgttattcctcaactgacgctggtagaagtcggtacagaagatatcctacccgactgaccgtttgctgtgaaggagttgcccacgtgtctgccggccgtgggagcgcctgcggcatgacgaacggccctcgacacgcggttcagcaccgcggccaagagccgttcttcaaaccggaatttcagggtctcgggattccggcgaacccgtggggcgtcagcccttgatcttgcccatcacgaccttggtgacagccttcgcgtcggcctggccgcgcgtggccttcatcacggctccgatgatgacacccatcggcttcatgttgccgctcttgagcttctcgacgacatccgggttggcctcgaacgccgcgtcgacggccgcctcgatggcgccgttgtcctcgacgatcttgtagccgtgcttcctgacgacctcatccggggtgccttcgcccttgagcacgccttcgacggtctgcttggcgagcttgtcgttgagcttgccgtcggcgatgagcttctcgacctcggcgacgtcggccggggtgattggcagctcttcgagcgagacgcccttggcgttggcctcgcggctcagctcgcccagccaccacttgcgggcaccggcggccttggcgccggccttgacggtctcctcgatcaggtcgagcgcgtcggcgttgaggatgtcgcgcatctgcaggtcgctcaggccccattcggccttgagacggttgcggcgctcgcgcggcatctccggcatctgggccttcatctcctcgatgtgctccttggtgatgtggagcatgacgaggtcgggatccgggaagtagcggtagtcgtcggcgtcggacttgagacggccgccggcggtggtctgcgtggcctcatcccagtggcgggtctcctgcaggatctccttgccgtcgtccagacgcgccgcctgacggcggatctcgtactggatggttttctcgatgccacggaacgagttcacgttcttggtctccgaacgggtgccgtacggggcgtcggcggaggggcgcaacgagacgttcacgtcggcgcgcatgttgccctgctccatgcgggcgtggctgatgttcagcgcacgcacgatgtcgcggatagcgcgcatgtaagcgccggcgatctccggagcgcggtcgcccgcaccctcgatcggcttggtgacgatctcgatcagcggcacgccggcacggttgtagtcgaccagcgaatggtcggcgccttcgatgcggccgtcggcaccgcccacgtgggtgttcttaccggcgtcgtcctcgatgtgggcgcgctcgatcggcacgcggaacacggtgccgtcctcaagctcgacatccaggtagccgttgccgttggtgggcttgtcgtactgcgagatctggtagtcgcgcggcatgtccgggtagaagtagttcttgcgggcgaactggctccactctgcgatctcgcagtgcagggccagacccagcttgatcgcgtagtcgaccgcggtcttgttgatgaccggcagggagccgggcagaccgagggagaccggggtcagctgcgtgttcggctcgccgccgaactcgatgtgggccgggcagaacagcttggtgttcgtggacagctccacgtgcgtttccagaccgaagaccacgtcgtatttcttggtggcatcggcgtacttcatcagtttttcagccatgatgtttgttttccttccgatgcgtcacttgttcaggccgtcgaaccacggggtcttcagggactgccagatcgggccgccccagctttcctcaagtgcggcttcgagcgcggcggcgggcttgtacatgacctcgtcgcgctgctgcggagcgatgaactggaatccgacaggcaggccgtcgtcggacaggccggccggaatcgacatggccgggacaccggcgaggttcgccggaatcgtggcgatgtcgttcatgtacatggccagcgggtcgttcatcttctcgccgaacttgaacgcggtggacgggctggtcggggagaccagcacgtcggccttctcgaaggcgttgtggaagtcctggatgatgagcgtgcgcaccttctgcgcggaaccgtaccaggcgtcgtagtagccggcggacagcgcgtaggtgccgaggatgatgcggcgcttgacctcgtcgccgaagccggtttcacgggtgtaggccatcatgttggcggcggtctgcggtacaccggtcggcggcatcacgcgcaggccgtagcgcatgccgtcgtagcgggccaggttggagctgacctcggacggcatgatgatgtagtacgcgcccagcgagtactcgaagtgcgggcaggagacctcgacgacctcggcgcccatctcttcgagcttcttgacggcctcgttgaagcgggcctcgacgccgggctggtagccgtcgccgccgagttccttgatcaggccgaccttgagtcccttaaggtcgcgcttgaggccctcgcgggccgcagcggccatcggacgcgggccttcgggaatcgacgtcgaatcacgcttgtcgtgaccgccgatgatctcctgcagcagcgcggagtcgagcacggtgcgggagaccgggccgatctggtcgagcgaggaggccatggcgatggcgccgaaacggctcacgccgccgtaggtgggcttgacgcccacggtgccggtcagggcgccgggctggcggatcgagccaccggtgtcggtgccgagggcgatcggggcttcgaatgccgcgaccgcggaagcggagccaccaccggagccaccgggcacacgctcggtgtcccacgggttgtgcgtggtctggtaggcggagtgctcggtcgaggagccctgcgcgaattcgtcgaggttggtcttgccgagcagcggcatgccggcggccttgagcttctcgatgacggtggcgtcgtacggcggcacccagccttcgaggatcttcgaggcggcggtggtctcgatgcccttggtgacgatcatatccttgatggcaatcggcacgccggccagttcgggcagcgcggccttgtcgtcggcgctcttggcgtcgaaggcgtcggcctggtcgagcgcctgatcggcggagaccttcaggaacgccttgatggacggttcggcggcgtcgatgacggcgaggtgggcctcgaccagttcgcggctggagacctcaccggccttgaccttggcggccatttcggccgcggacagcttgacgagttcagtggtgtcgctcatcgtcactcctcacttcccagaatgcgcggcgcgacgaacatgccggcttcggtcttcgggcctccggcaagcgcctcttcctgcgtcagcggcgtttcggcgacgtcggggcgcaggtacgcctccagcgggacggggttggcggtcggcggcacgtcatcgccggcgacctcctgcaccttgttgatggaatccgcgatgacgttcagctcaccctgcagacgggtgatctcctcatcggtgagcgcgatacgggcgagatcgcccaggtgctcgatttcttcacgtgtgaatgtaggcatggccttaactatatgagccgtatgtgacacgcaccattacattctcacgatgttgcgcggtgtccggcggccctgcggcagcggccatatcgcgcggctgtgcccgagcgcgcgacgatatggccgaatgggtgtcatttgatgtcggatttcttgaacaccagcaggccgatcaatggaatcctccactcgtcggcagccagcggcgtgacctcgtggctgaggaacaccagtctcgccacgccgagcgacggcacgggctgaggctacggcgggatatgaggctgcgccatcgcggcacctcctgcgtgttcggctgagtgtaggttgcggcaggctcgccgtattgggccggcacctgccccggtatcgcgcgggtctcgtactgcgcctgcgcgaacgcccgcgcagtcggctccaatgcggcaccttcaatgcggaacacccggccttgctgcgggtcgttggcattgcggggcacctcgcggacggtgacctgcggcgcggtttcgaacaccgcgtgcagtttgtcgggttccggcgtcgcgacacggatcgaatgggtggaatgctctgcgacgaacgccgcgaccgtcgtggtctccagaatgcggccgcgaccgatgatgacgagatcgtcagcggtcaatgcgacctcgctcatcaggcgcgaactcaacagcaccgcacggccctgcccggcgagaacgctcctgcattgcgcttttccacgctcgcaaggccggtgaattcgatgacctcatcgacgcgggatcgcggtatgccgttggtaagggcgaggccacgcagatgggtgtaggcggaccgacccttatgcgcggatttggcgtcgagaaccgctcctacggcggtcatcggcgatggtgtcttgacgaacggcactccgtcaaccagcgcacggcccgcattgggggtggccaagccgagggcggcccgcatcgtcgtggacttcccggcgccgttcgacccaaggaaaccggtcaccttgtcgtcttcggcggtgaaactggcattatcaagcacggtcttacgcccgaagcgtttggtaaggcctctatcgttatcatgattcgagcatacacacccgcgtcacccgtgctgcgcaatccagctgtgcatggccactgcggctgcggcgccggcgttgatggaccgcacggaaccgaattgcgagatgtataccacgtcatcagcgagttcgagagctttgttcgacaatccggggccttccgcgccaaacagcatcagacaccgttccggaaaacggtaggtttccatcggtacggcaccgggaatgatatccaatgcgatgatgcgggacgattccagcgtcctgatgcgagcgtcggcccgcgcgaccgcatcatagcccgaatgatccgttgcggacgcgaatcggggggatccgttggattcgtcatcgtccgagagaagcgcactcgcatcggagtgagcctgatgcgcgtgcatcgccgcggcggcggcctgtgcctgggcggcggcaatttctcccgcgatgcgcagcttccagcaggtgacgagttcgtcgatgctgggatgatactcaacgtgctggtacagctcggtcatcagcgagcccttgcggttccatttgtgcgggccaacgatgtgcacgcgattcgcggtgaacgcattcgccgtgcgcaccatggaaccgatgttgaaatcgtgcgtccagttttcgatggcgacttcgaagccgtggcgaccggccgcgtccagatcgtcgcgaatggcgttcacggtccagtaccggtaacggtcgagcacgttgcgacgatcgccttcatccagcagcgtcgtatcgtagcgtcgatcgtagttcggcgatttagggtcatccgggcgtggctcaccggggtgctcctgcgtccatggtcctacgccgacttcacgaaattccggctcccccgaagcctttgccgccagagagatggggttgggcttgtgcatggctatcgcagttcggattcgtggtagatttcgatgaatggcagctcctgccgttcaccgctcacggggttgacgacctcgatgacgggttcggtcatgtcgacgccgccgatcagcgatgcgatggcaaccactttcgcgccttcatgctccaccacgccgaaatcgaggctcagctcattgccgttgcgcagcgtcactagcgacgaggtctgcacataggatttctccgagagccatgaatccagcaataccacgcgcttgcccttgatggacgggcctttgatggacgggtatacgaagtccatgacgaatccgtcgaggtcttcaccgcgcgatgccgccgcctgaatcatcgcgccgaccagtggaacggccgcggcggtcaacgcaccgacggcgtcgaaatcatcgatggaatagccgttctcctcaagcgcgtccagaagaatgtgaccgacgatagccgccccgcgatggtcgaaggtgacgccggcgagctcgcagaacggcttgccttccatttccgcggcaatcagccgtcggagctgttcgcgcggctccagcatggagaagtcatccgtctgactcggcgatgcgtcggaaggaatgttgttcgtgcccacagcggttccggtcgtcccggtcttgcggaatccttgctcttcattcatggttctcaggatatcgttgcgtgccgtcaagtcaccgccggcaatggccatgcatatccgcgcggttgcgtatttgcctcgctggcgggggccgagtcatgctggtattcctttggatgctcttgcgttggttttattcggaggtggtttccggggcggtgatttcacggacatcggatttgtccggatcgatgatgttcaccgacccgatgaccgtggcctgatcgagcttctgcagtttgcgcgcggtgaccagcacgcgggattccaacgatgacgcgaattggttgtacgccgtcacggtgcgggtgagcgcggtaccgagtttgttcgcgcgctcccccagtacggcgaaacgctcgtacagttccctcgacaggtcgaacagggtcttggcgtcatcggtgaggctctgctgctgccaagcgtatgcgacggatttcagcacggcccacagggtgaccggcgaggtcaatgcgaccttgcgggcgaaggcgtcatccatcaatgtcggatcggcctccattgcagcctgcagcaacgcctcgttgggaatgaacgcgatcacgaaatcaggggccgtgtcgcatgcactccaatacgccttatcacccaatgccctgacgtgttcacgcaaagctttcgcatgcgaccgcagcagctcgtcacgccgttccagatcctcaggccccgcggtttccggaatcatgcaggcccgctgataatcggcatacggcaccttcgcgtcgatgggaatcgtcttgcctcccggcagatggacgatcatgtcaggccggagcgtcttaccgtcgacgccagtcatcaccacctgcgtatcgaagtcgacgtgctccagcaaaccggcggactccacaatgttgcgcagttgcgcctctccccaagcgccgcggaccttgttgttgcgcaatgccgccgagagcgagctcgtctcacggtcgagcctcgcctgctgctcacccagccctttgagctgctcgcccagcacgcccatctcgtgtttgcgcccctcctcgatgttcgagaccttctgctgcagctcatcgagattcttctgcaaaggagccaacgccgacagcaccttgccctgctctgtcagcgctttttcctgctcttcccggcgccgcagcccatcggcctcggcccgctcgcgctcacgttgcacccgcacctgttccgcctgctgcgcctgagcaagctgggatttcgcgaacgacaattgctgcagaagtccctcggactgggccttggcctgagccacttgggcggcaagccgcgcattgtcgtccttcatggcctcgcaggatcccctcagcgcgtccacctcggaggccttcgccatgcgggcggaggcttggccacgcattttgcccagcgcgaatccggcggccagacccaacaacgccaccaccgcaacgatcaccacatcaagcacttcatcgaacatgtgtattattacacatcatcccgcggacgaacgagtgccgcacttatgagcgaaccagtcgggaaatcaccttctcgacctccgacagtttctcgtcggccacctcgccgccctcggccgccgcctgccgcacgcaatggttcagatggtcgtcaaccagcatcaccgacacggccttcaatgccgaagtcgcggcggagatctgggtcagcacatcgatgcaatacacatcatcctccaccatctgcgcgaccgcatggacctgcccctcgacacgccgcagccgcgcgaggatcttcgccttgtctccgtcgtaaccctgcataaccaaccttccgcccagcgcgaacattcctgacaacacgcattatataccctctaggggtatagggtatagttaatatccgagattatgatagaaaggggaaaggagcggcgatggaattcgacatcttcctcggtgtggcggcactggtgatagccgccgtgctgacatggtgcatcctgcgattcttcttcgcgcccagaaggggaggcgcccgggcgacgctgcatgacggcgttcaacaggcgaccatcacggtcaggggtgggtactcccccgatatcgtcacgatgcaagccggcattccgatcacgctgaggttcgatcggaaggagaccggcgaatgcacgtcgcatgtcgtgttccccgatctcggaacggacacgatgctgccgggcaacgagaccaccgagatgtcgcttccgccgctgccggccggcgactacccctttgcatgcggtatgaacatggtgcatgggttgcttcgcgtcgagggggagacggactccgccacaaaaccggacgacggcactgcatcgaccgggaccgccataccggccggcacgcccaggatgtccgccgcggacgcgctgctggccgagcggcaggaggcggaggaacgccgtcaggagattcgccataccggcatgctggtggccatcggcaccgttctcacgctcccggtgttcgtccccatgatgctcatgctcgtcagtcactcgctcgttccttcatggctgatgaacccttggctgcaggccatactcatcaccccggtcatgttctactgcggggcgccgatccaccgcgtcggatggccggcactgtggcatcgttctccggacatgaactcgttggtggcattggggaccaccgccgcatacctgtacagcatcgccttgtgcttcgtctcggagctgatgcccgaggggtcgagagagccctacttcgagtcggtcggcgtagtgatcacgctcgttctggtcggacgcctgttggaggcgaaagcccgtgagggcaccggaaaggccgtgcaatcactgatcaagctgcgcccacgtgtcgcccacatcctcgatgtcggaacgccactggccaaggatctggccgccggcaaggcatccggcgacggatggctcgaccctgcccaatcccaagacatcgacatcgaccgcgtgaagaccggcgatctgctggtgatccgcgccggcgagcgcataccgctggacggcgtcgtgttggccggcgaggccagcgtcgacgagtccatgatcaccggcgaatccgttctggcccggcgtggcgtcggagagcccctgacgggggcgaccatcatgcagcagggcaatgtggtcatgaaggtcacacgcaccggcgaggacacggtgctctcccagatcatcgctctggtcgcacgcgcacaggcgaccaaagcgcccgtgcagcgtctggccgacaggatcgcccgtgtgttcgtccccgcggtgattatcgccgcattgtggaccggtgccatatggataacgttcgggccgcaacccaaactagcccatgcgctggtgacggcggtcagcgtattgatcatcgcgtgtccttgcgcgctcggactggccacgccgctatcggtgaccgcggcgaccggcctcggcgccacgaacggcgtgctggtcacatccgccagggccttggagcaggcccgcgacatccgaaccgtcgtgttcgacaagaccgggacgatcaccgtcggagccatcgatgacgacgccgactacgccaagccgagctatacgaaggacagcgtcaagccgggttccaaggaggcgatagcagcgcttcgagccgctggtatccgcacggtgatgctgtcgggagacaaggcggaggtcgccgaacgcgtcgccgcggaagtcggtatcgacacggtgatcgctcaggtcaggcccgacggcaaggcctactggataagacagctgcagatatcgcgcgacgccgccgcggcacagtcgtcggtggcccccgccatcgccgacgtccccaatggactggtggccatggtgggcgacggcatcaacgacgcccccgccttggcacaggcagacgtgggcatagccatcggcaccggaaccgacatcgccatgcaatccgccgacgtgaccctcatgagcggcgacctgcgaggcgtggtgaaaaccctcaacctatcccaagccacgatgcgcaacatccgggagaatctcgcctgggccttcggctacaacatcatcggcatccccatcgccgccggcgtgctgtaccccttcaccggctggctgctcagcccgatgatcgcaggcctggcgatggcgctcagctccgtctgcctggtgctgaacgcgaaccgcatgcggcgcgtcacactgagccccgacaccgtctccttcaccgccgcaggcggaagagacgccgacaggagagcgcccgaccaacacggcgcgcgcagcatcattctcgacaccggagaccgtccccgtgccgatggccatcacaccgatgagggccatcaccatcagccgaacaaggagcaacccatgcacatgaaccacatgcattccgcagacatgaacgacgcgacgcagaccgcgaccgaccctgtgtgcggcatgaccgtcgccgtcaacaacgacgccatcacgcgcgagcacgacggcacgacctattacttctgcggggaacactgcgccaacaacttcatgaaggcaccgcagctgttcctggaaaactgaccggcccgtaaaactgcccggcctgaagaccgaccggaccgtggggcgcaaatcattccgtcgagtactaccggcgctttgatctgcgtcccttgaagtagatgtcgaacacgatccatgcggagaggatgaacgctatcacatatcccatgaatcccacgaccggtatgccgaagatgatcggcttcatgcccgcgtagtacacgatcgacgatccgacgaacaggccgacgacgatcaacgccatcgtcagacggttgaccatgtccgacagcaggcgcatcggttcctcggaaccaacgacctccatgttcatgcgcagctggcctcgggtgagcatgcgcatcgcgaccctggactcgctcgccgcggacagcaggccgtgcaatgcctgatgtccctcgacgcccagcgccttgatctcgtctttcgccgctcgatccaacgacttgctgccagcaatatggtcggagatgatctgaatcatgttcacgtcggggatgaattcatccagcaggccctccaacgtgaccaacgccctgccgaccgtcgtcaccgtgcccggcacctcgatgccatgcctttgggccaacgacgtcagcgacgtcaggaacgccgctatgtccaggtcgcccaggtctaccgtgccgaactccttgacgaccatgtccaggtcggccagcagcgcggggtaatcctcaggattggactcggtgcccgcgaaacgcagcagaccgtccgccagcgcggcggaatcctgtttggcgacggcgaagatcatctcccggagcacgctgcgggcctggctgttgagccgcccggtcatgcccagatcgataagcacgatctggccaccggagatgatgatgttgccggggtgcggatccgcatggaagaaaccgtcgtccagcacctgcgtcgcatagttgtcgaccagcttggtgccgatttccttgaggtcatacccggcttcgatcagctgatcggtatgggagacggcgatgccctcgacgtaatccatgacgaccacgtgctcggtgcacagatccatgtacggtttcgggcagtccatataccgataggcttcgcagaagcgcttgaactcgctgaggttacgcgcctccaccagaaaatccgtctcggattcgaacgtatcccacagttcctcgaccacgccgccaagatccaccacctgcgcactgggcagcatcttcgtggcagtccgggcgatcgaacgcatgatggacacatccaacgccatgatctcgcgcacgccaggccgctgcaccttcacggcgacgtcttcgccggtgaccagcgtggcgcgatgcacttgcgcgagggatgcggaaccgagcggcgtcggatcgatgcgggcgaacacctcgcctatggggcggccatattcctgcgtcaacgtgtcgacgacgatctgatacggcatcgggtcggcatcggcgcgcagcttcgcgagctcgtcgcagaacgactgcggcagaatctccgaccgcatggacagtatctgcccgaccttgacgaatgtggggcccagtgcctccagcatcagcctcatcttcaccggagtgaggccgtgcaccacgtcgaactggttcgcaatgcgcatgatctgtccgaggcgcttgactttcccgcgcctcgtcaggtgatatcggctggagaaggtgtcgcgatgattgttgaacagcccgatggtgggagacccgtcccattcgcggcgtttgccggcacgtcgcgtcacgacaccgtctttcgccgaaccgtccgaccccgatgcggatttcccccgttccggatcatgccgtgggtcgccggcatggccgcccgcggtataggacggcatggtgtgctgctccggcatgctaagcagcggagccttccgccggggaaggatcttcggcggcggcaccggcatcgctctgctccttggcgccctcagtcttttcctcggccttctccttggcctcctgcgccttgtgcttgagctcggtgttcaacgccttgccctgttccacggtgagctcgcccttcttcaccagaccgtcgacgatctgctggctcttctcaaagctctgctgccccagctcaacgccggtggccaatgccccaacgcccgcgagaaacacccggcgcaggccttcacccaaatcgaaatcagccatgatacctcctttggttacttgtggttccaagattacccccacccgtcgcataacgcgataggggtggcgtggtttccgctatgagatggaaaccacgccccggcaatccgctcatcggcccatcaagctcatcgacccgtcaagcatcgcagagtccgagggcacggaaccgtccaattcaccgggggcgggcggcggcgaccttgcgggccttgtccgccagagcgtccaaccgtgccagttcgaacatctgctcgctggactggtccggctcgaactccccgtaccgtctcgtcactgcggcccgaatcaggaaatccgcgaccgcggggttcttcggcaacagcgagccatgcatgtacgtgccgatgacattgccgacacgagcgccttccgtatgatcctcgccgttgttgccggtaccatcatgatcgacatgccccagcggcaacgttccctcgcgcaggaacgtctgcccggaatggttctcatagccgatcacgtcgccgaattcgtcgctgtgctcgaccagattgccgatcatccggtggctctgccccaccgtgtacgcgccgagcacgttgatgccgtccaaccgctcgccttccgaggtctcgaagtattcgccgaacagctggaacaggccgcagatcatcagcatcggcgtaccgtccgcggccaggtcgcgcagccggccggcccgcttgaacaggtcgccggtgattttcttctgcccggtgtcctgaccgccgccaccgaggatcatgtccacgcgctcgggccattcgtcgccctgattgtatgcgtgcaggcgcggctcatacccgtacagtgccagccggcgcagaaccaccagcacgttgccggaatccccgtagatgttcatgtccttcgggtagagggacatcacgtcgatcacttttcccatatccgttcacctttcccgctcatgctgtcagtcgccgcgccgttcatcgcccgacgccggcatcggcgacggtggtcagcttggcgagttcggcacgcacgcggagcatcgacgtgtacgtgcagtagatgtgtttgggcacaccgggacgggcggtgacgaactgccgcaccgccgcctccagatccgtgccggtctgctccaccctgacctgatcgtattcgagccgcaacgccatgtcccaggctcgcgtacccgacaccatcgcgacgccagtcgggcgcaggctggtgaaatcgacatcccacagccagctcatgtcgcgcccgtccgcgtacaggtcgcagatggcaatcatcgtgtcatgcccgtcgggcgggaacgagccgagcgacagcctgaagcccatcgggttcttgacgagcagcagctgcacgtcgctgccgttgaccgcaatcgtttcgccgcggccgaacgcgggggtcacctcggcgagcgccgccagaagccggtcatggtctactgggctgtctactgggctctcgtcagatatcgccgcgtctgacgcatgcgaggcctggccgggcatggtttcggcggggacggtttcggcgacctgcgccgaagcaatatcctgcgccatgaccgcgcggacggtggcgagcgccgccgccgcgttgaacaggttgtacacgccttccagcttgacggcggtatggacggcccgcccgtcaatcaggaaatcggcctcatggttgccgacacgggtcagcgtgacatcagccgtcgcctcgcgcccatcggcatcgggggcctcagccgaaaccgatgtgcctgccggctcctgctgcgcgcggtcatttgccgacggcctgccattgccggccacgctcgcggcctcttcggcgacggtggtctgcatgtcgtcgtcggaggggaagaaccgacgcagttcgggcgccagcccgaaatagcgcactccggtgccttccggcacggccgaagcgaaacgcgcgattcgcggatcctcacggttgagcaccacggtgcccgtcgtcgcttcggcgacacgctccagcagacgcgcggtgttgtcgatctcgccgaaccggtcgagctgatcgcgcatcacgttgagcaacagcgcgaaccgcggcttcacctgctgcacgaatttcaccgcatacgcctcgtcaagctcaagcacggccacgtcggcgtccagcctaccgctcaacggcacttcggtcagcagcgccgagacgacgccgcgcgtgaagttggagccggtcggattggtgaacaccttgagtcccagcgtctccagcatcgaggcgaccatgcgcgtcgtggtggtcttgccgttcgtgcccgacaccagcaccacgccatacggcaggtcggcgagcgtgcgggcaaggaaaccggggtcgatctgttcgacgatcttgccagggaacgcgctgccgccgtgccgcagcagccgagaggcgccgcgtacggctttgccgatcagcggcgtagcgaacgcggtccatggacgcgccgcatccgactgcccgcccagcgcctcgcgccgtgtttcacgcgatgtttcacgaggctgggatccgttttcctcacccatcgtcacactccttgatcgctgttgtagtcctgcggcatgtccttgaacttcgagtatgcgcccagaaacgccagatggaacgtctccgtcggaccgttacgatgcttcgccatgatgatatccgcctcgccgggccggtcctccttgtcgtagaaatccggtcgatgaaccagcaacaccacgtcggcgtcctgctcgatcgagccggattcgcgcaggtcggacagctgcggcttcttgtcgttgcgcatctcgggcccacggttcagctgggacaacgccacgaccggcacttccagctccttggcgagcagcttcagcgctcgcgagaactccgagacctcctgctgtcggctttccacctgcttgccggatgacatcagctgcaggtagtcgataacgacgagcttgaggtcgttggtctgcttgagacggcggcatttcgcacggatctccatcagcgacatgttcggcgaatcatcgatgaacagcggcgcgttctgcaacttgttccagaaattgttgagcgtgttccaccggtcggcggtgatgtcgtcggcgcggcgcatcgccgcgagcggaatgttggtctcggcggagatgatgcgctgcgcaagctccaccttgctcatctccagcgagaacacgatcgacgtcatattgtgatgcagcgcggccgcacgggcgaaatcgatgcccagcgtcgacttgcccatggcggggcgccctgccacgaccaccatctggccgggctgcagaccctgggtcacgtcgtcgatatcgcggaaacccgtcggcacgccggttttcaggtcgccgttctgcagcttgtcgagctgttcgagcgcatcgtgcaccaccgggccgatggcctcgtagtcctgcttgacgcgtccggtactcatctcgtagacctcggcctgcgcgaggttcaccacgtcttcggcctgcgagccctccgccgagtagccgagctgcgcgatcttggtgccggccgcgatcacgttgcgcaatatcgcccgctgatgcacgatctcggcatagtacgtggcgtttgcggcagtcggcacgaacgcgacgagcgtgtgcagatagtcggcgccgcccaccttgtcgaggtttccgtccttcatcagctggttggcgacgatcaccacatcgacgttctgcgagttcgagaacaggtcgatgatcgcctcgtatatcgtctggtgcttcggctggtagaagtcggtgacgtcgatcatctggctgacctcgccgatggcgtccttgctcagcagcatgccgccgagcaccgccatctccgcctcgtcgtcgtgcggaggcacgcggtcgaacacggcgtcgcgccccggcgaccccgcgtcgccctgcacatacgagccacctgattgcgggcgcggccctccccaattcgtttcttctgctgccataagacttgagtatatatcggagcttttccggtggaagatatctggcgaaaaatgcacagggccatctctcggacggcatgtcgcggtaagcggacgcgacattcgtcaccgtcacacacggcttgctcgcaagtcatattcagccggcgtttacctgcgcgacacgcacgggtgacgtcatgtggacaaaaaagttgagttatccacatttaggggataactctggggataacatatgcagttatccacatcagggggataactctgtgcataacatggggataagtccataaacgcccccactcgatttgccaaacacgtcgtcatgcgatataagcggcgccccattcggctcaccgccgcgctttcagctcttcgatgccgcatacgcacccgcccatatgagctacagtgtgcatgtgcacacccctgacccacaatcatccgatcccgcgaccgccggcacggcccgcaccggtaaccgagccgcatacggccgcatactcgcgctggccctccccacattcggccagctcatcgccgagccgaccttcgtgctcatcgacacggccatcgtcgggcacatcggcgtctccgccctggccggactgtcaatcggatcgaccatcatcctcaccgcggtgggactgtgcatcttcctcgcctactccaccaccgcgcaggtggctcacctgcttggtgcgggccgccgccgagaggggctgcaggccggcatagacggactatggctggctctcggcatcggcatcgtgctggcggcggctctgttcgcaggggcccggccgctgtgcgtggggctcaggggcacgggcgagacgctcgaccaggcggtggcgtatacgcagacggtggtactcggcgcccctggcatgctgctcgtgtacgcggcgaacggcattttccgcggtttgcagaaggtacgcatcacgttggtggccgcggtgtgcggtgccgtgctcaacaccatgctggatgtgctgttcgtgttcggattcggctggggcatcgccggatcgggcgcggcgacgatgatcgcacaatggttcatgggactgttcctgacggttccggcggtgctatgggcgaaggccgacggcgctgcgctgcgaccacgcctgtcgggcatcgccgccgccggaggggatggcctgccgctattcatccgcacactcgccattcgcgccgcgatggtgatgacggtcgcctcggcggcccgattgggaacgacagtgctggcggggttccaggcggtgaactcgtcttggaatttcgcgatgaatatgctggattcggtaggcatcgccggtcagaccctggtgggcgcggcgatgggcgcaggagaccgcgcacgcacactgcgactgacccgggccacgggacgagccggattggcggccggagccgctatcggctgcggattcgccgtggccggcctgttcgtcggccgcctgttctcgcccaacccgcacgtccagttgctggtcgccgccggcatggtgacgatgggtgcattcctgccactacaggggtggatgatggcgctggacggcatactgatcggcgcccgcgatttccgctatctggcgattacctgcacactgaccgcgacggtgtatatcgcattgaccgcgatctgcgtggatgcggccgcgcccatgctgcccggcgacctggcctcgaccgtgctgctatgggcgatgttcaatatcgtgctcatgggcggccgcggcctgttcaatggtctgcgcatacgcagcgaatcatggctcggtcagaccgccctctaacgaccggcccgcgacagccctcgctgcgctgcggaacacccaccttgacatcgcctttgcctcagctgagcatcatatgataatggcatcggcttccgaagatgggagacgccacgcggaaggagattccgccccgaatcagatgacatccgaatactcacagataagcaaagcatgatcgacgtgcgggagaaggccgctaggcagttcagcgcgcgcctgaccggtcgcgggttcgaaagctgggtgcgagagggcaacgacacctatgtggtcggcggtcaggaatacatgccgcaggacctggtcgtggtacgcgccctcgacgcggcgggcaatcccgtgtcaaccgaagtcaacgtcggcatagccaccttcaacctgtacccggatactctcacgggcggcgctgtacatggcacgcaccagactttcgcgccaatggctccacccgtatcgcttggatatctcctcaccggccgtagccccgagcgacgacccgtcggcgcgggtcaggtcatacagcatgtccagcagcatcggatcacggtccacacaacgggcgagcgactcccccacggccggatcgttcgggttcttgccggtcgcgaactcagagagcgtcagatgctcccgcaccaggatgcgcacccatcgcgcgatgtccgcgtcgaatcccatgcgcttcatgatcaccgcggcgtgacgggcgccctctgccgcgtgatcggtcacgaacggacgtttgccgacatcatgcagcagtccggccaatagcagcgccgtgtagtgacggtcgtcataccgctcgcctcgcgccgccgaaacccgcgcgagccgtgacgtcacctcgacgctgtgccggtcgatggtataccggtgcgctgcagacgcgctcgggcgattgcgtatgcccagccattcaggcatccatcgaccgggtatatccacgaaatccagttcctcccacacgcgcatgagcgccggcccggaggccagcagacgcacgaacagttggcgcgactcatcatcccacacggaatcgcggatcgggcagcgccgcaggttctgcaaggtgaccgggctgatcggcagctcgaactcggcagccgccgcggccacgcgcaacggcagataccggtccggctccggttccacgcccggagccagcacgatttcctgctcgtgcttggccacgccgggcgcgacctgttcgaacttcggggcctctcgcctgcctccaccgcgcggcgacagcatctggaagaacgagaaacgcgggcgctcatgcgtcagcgaatgctcggcacgcgacgccgtggaatccagcgcgaacgcgatctgtcggcctatgcgggcgagccgggtctgcaagtcctcgatggaacgcgcctcccgctcccccggcggcagtgtcgggtcggcaagaccccgcatcgctgccacctgcgcctgatatggggcgagcagccgattcgcgtccttgccggcagccagatgaatgcaatcgcgcacgtccagcaacgcctcgacctcgtcgtcataccggccgtgcggtcggtcggcaagccatgacacagtcaacgcggagaccagcaccgaatcgcgcagaccgcctcgcgcctccttgatgtcgggctggttcaggtaggcgagtcgtccgaactcgtccagtcgcttgcgcgccgaattcagcagttccggcagccgcttgcggaccgctcgacgccagcgttccagaatcgacgtggccgtcgccgaaatcagcgccgtatcgccggcgatcggcttgacatccagccagcccatagcggccggcagatcggaatcggtcacggcctcgcactgctgccgcgtgcgcaccgactgatcgaggtcaaggccgctgtcccacaggggataccacagtttgttggtcagctcattgagctgttggtcgttgatcgtatgtggctcatagatgatgaccagatccaggtcggagctcgggccaatctgcccccgtgcgagcgacccgaccgcgccgaatccgatgccggtggacggcacgtcgaacggcaccgcggccaccgcgtcactccacaggcggcgcaggcaatccatggcgagctccgttcgcgcccggcgcttcgcggagccaccccggtacacgccgtcagcatccggctggctcatgtccatgaaccgttgcttgagatgatcgaccgccgaactcaagacacaccaccttcaccaaattccgccccgcaggcgggggctgtcggtggagtcggcgggaggtggtcaaacccacccgggtgcacaagaccaccctcagtctcgctacgcgagccagctcccgccagcgggagcaatttcaatccttgccctccgccaccggaggcaaggatgtcgatatatatatataaagagtccccgcatggtcaggtgacggcgtgcggggacttgtcttaccgataacccgcgtccggcggaaagcgccgaaccacgggccgctttcagatcgcggcggagccggtctcgccggtacgcacgcgggtcacggaatcgagcggggcgacccacaccttgccgtcgccgatcgtgccggaaccggcagacttgacgatcacgccgaccagggtctccgcgtccgcgtcatcggacagcacctcgacgcgaatcttcggaatcagatcgaccgtgtattccgccccgcggtacacctcggtgtggccacgctggcggccgtaaccgttggcttccgagaccgtcaggccgtgcacgcccgcagcggcgagcgcctccttgacgtcatcgagcttatggggctgaatgatggcagtgatgagcttcatctcacctcacctccttgagaaccgagctggcagtaccagcaaaatcataggcacgttcgccctgatcggccagatcgatgccgccgacctcctgggcttcggtcacacgccagccgatggtcttctccagcgcgaacgcgataatcgcggtcaccacgccggagtacagcatcgcgcacagggcgatgatgacctgtacggccagctggcgccagtcgccgccggcgagcagaccagcgtcctcgccgaagaagccgatgagcacggtaccggtcaaaccgccgacaccatgcacgcccaccacgtcgagcgaatcgtcatagccgagcttgaacttcaggccgcatgcgaagcagcacagaacgccggcgatcgcgccgatgaccatggcccacaacggtgacaccacatcggccgcgggggtgatggcaaccagaccggcgacgatacccgaggccgcgccgatagccgtgtaatgaccggtgcggatcttctcagcgaagccccaggcgagcatggcagccgcggtcgccgcggtcgtgctcatccacgcatagccagcggtgccattggccgcgaacgccgagccggcgttgaagccgaaccagccgaaccacagcaggaacgcgcccagcatgacgaacggcacgttgtgcgggcgaatcggctgcgtgccgaaacccttgcgcttgccgatgatcagcacgatgataagggccgccattgcggcgttgatgtgaacgaccgtgcctcctgcgaaatcatgcgccgcggcgccgatcgcggtggagatcgggccctttgcgctcagaaggccgttattccacaccatgtgcgccatcggcgcgtagtcgaacgtgacccacagcgccacgaacagcatccatgtgctgtacttcacgcgctcggcgatcgcgccgcagatcagcgccacggtgatcatcgcgaacgtgacctggaacgacacgtccacgctgctcgggtacttgttgccgttcgcggcaaggccggcggccgtgtactgacgggtgccggcgtcgaacaccatcgtgtccttcagcaggaacccggtcgcagggtcaccgaaaatgccgccgatgctgctgccggcgtatgcgatcgaccagccccacagcgtccatacgaccgcggtgaccgacagggccgccgccgacagcatcagcatgttcagcacggctttggcgcgcaccataccgccatagaagaacgccacgccaggcgtcatgaggaaaaccaaggctgcggatgtgagcatccatgcggtattaccggagtccatcgttaccttcctctcttgttcgttcccgccgccgcgcatcttgaccgcgcgggaagcgggtcgttaccacttcatctgacatcccctgatagggggaatcaacacaacgatatgcaacgctcgctgagttttcaacacgttacggcacgttacgctcatgtaaagcgcgatgacgcgggtcttggctttcggccggattccggcgcaggcaacggttccggaatgcaaaagccggctgtccacgttgtggactgccggcttgcagggttcatgtccgacggtttgcgaacaacctcacgcgagaatgccgtcgacgaatccttccgggtcgaagggcgcgagatcgtccggtccttcgccgaggccgacgagcttgaccggcacgccgagctccttctgcacggagatgacaatgccgcccttggcggagccgtcgagcttggagagcacgacgccggtgaggccgatcgcctcggcgaacaccttcgcctgcgccatgccgttctggccggtggtggcgtcgagcacgagcagcacttcgtcgacgggcaggttcttttcggtgacacggcgaatcttgccgagctcgtccatcaggttcgacttgttctgcaggcggccggcggtgtcgatgatgagcacgtcggcgtcgtcctccttggcgcgggccgccgcctcgaacgcgaccgatgccgggtcggcgccgtccttgtcgctgcgcacgacgggcacgttgacgcgggcgccccaggtttcaagctggtcggctgcggcggcacggaacgtatcggccgcgcccatgacgaccttcttgtcttcggagacgaacagacgggccagtttgccggccgtggtggtcttgccggtgccgttgacgccgaccatgatgatgacgccgggcttgtgcgcgtccggcttgtcgacgttcagacgacggtcggtgtcgcggccgaccaggtcgagcaggttgtcgcgcagcgtggcgcgcacctcgtcggggcttgtcttgccggtgatgcgcgcatcgcggcgcaattcgccgactagctgatcgcttgcttcggcaccgacgtcggccagcagcagcgtgtcctcgacgtcctcccaatcggattcggagaggttgtctttggtgaggatgttgaacaacgccttgccgaacggattcgaggacttggaaagtttcgccttgagccgctgaatgcgcgagccggatttttccggtacatcatatgcgggagccgccggcctggccggggcggcctgcgtcggttcgaccggtttacgctcttcctcacttcgaggggaggcggcttcgccctcggtttcgggagcagagagctgcctgtcaactgttgcggcgaccgtctcgggttcttcacccgcacgacccgcctggcgcggcgatgttgcggtttccgccggccggccgacgacttcgttcttacgcgacttgccgcgtactacgccccacacaataagcaggacgacaatcaccactgcggcgacaatgccgataatcagattcgtatccatggctccagcctaaaaaccgcaacggacagctgccggaataccacatacgtcgcattgttgcagccaagtcgacgactaattgggctgctggcacagacgctgcccctgagtcgtccctacatatcgaaccggggaagacgctggtataggcaaatctgccaccaatacataaagcggcataccagacggcaccggattgccagcggtcccatgatattcaacatagaacaagtcgggcaatggtgccccaccctcatcgtggtaatacgcgcgaccgccaccgaaaacacgtatcaaacaggacacgcacgacacgatgtcatggttgtcgaactcgctcgccgtcatcgacggggccacatacgtcttcatgatcgactctcctcagccgcacggccctcgcacgacctaccgcgaaaacgtagaccccgacaacatttcggggggggggtataggggtataggcgctaggcaccgcgaccactacactggagctcatggccaatactgcaagaatgacggcgctgcaacgccgcgaacagctcatccgcgtggggcgagcgttgttcgcatccaaggggttcgaggcggtgagtgtcgaggagatcgccgcgaacgcgaaggtcagcaagccgatcgtctacgagcatttcggcggcaaggagggactgtacgcggtaatcgtcgaccgtgagatgcgcgagctgaccaatgcgctcatcgaggcgctgtccgacaccaaggcgcatccccgccagatcgtagagcgcgcggcactcgccctgctcacctatatcgaggagaactccgaaggcttccagatgctcgtgcgcgactcgccgaccaccgacccggccggatcgttcaactcgctgctgggcgacatcagcctgcgcgtggaggatctgctcaccgccgcgttcaaacgccggaaactctccgccaagggcgtgccatactatgcgcagatgctggtcggcatgaccgtattcaccggtcaatattgggcggaccggccgaaggtcaacaaggagcagctcgccgcatacgtcgtcgacctcgcatggcacggcctgagccggctggattccaagccgatcctgcggttcgagagccagaaggcgaagcagctcgcagccaaggaagacaaagaacgtcgagacaaagagcggagcgagacaacggccccggacgagccggacgctcctgtcgagaccgccgaaccggacgaaccggcatacctgcccgcgagcgccgactgatcatcagaaccgcgcacaagccggaagcccaaaaaacggcggaacggacgacgggacttgcctgaacgccgcttagtgatagctttgcttgtagaggttagactcgctgcaacatccgaggcgacgtgtcgcacgtcatccccgcgacacctgtataacgaggaactatggaacaatcgtcgaaaacactcaccttcgtggtgcccgcctacaacatggaaacgtatctggagcgctgcgtggagtcgctgctctccgcgacggacaacagcgacatcgaagtgttgatcgtcgatgacggatcctcggacggcaccccggaacttgccgacatgtacgagcggcgctggcccggcaacgtgcgggcaatccaccaggtcaacaagggccacggcggcgcggtcaacaccggcatcgccaacgcgaccggcatgtatgtcaaggtcgtggacgccgacgactgggtggatatgccctccatcgacacgctcatgggcacgctgcgggtgcagcgcgtcgccacggatccggtcgacatgatcgtcaccaattacgtgtacgacaaggtgggcaagcgcgtcaagcacacagtgaacttccgtcatgcgatggcgaccaacaccgtgctcggctgggacgatctcggctgcttcggcgtcgccgaatacatactgatgcacgctctgatctaccgcacccaggtggtgcgcgactccggcatgcagctgcccgagcacacgttctacgtcgatttcatctacgcataccagccgttcccgtgggtcaagtcgatgctgtacatggacatcccgttctaccactacttcatcgggcgcgaggggcagagcgtacagaccgacgtgatgatccgccgcgtcgcgcagctgcggctcgtcaaccagcgcatggtggaggccactcccgaaccgggaaccgtgccggacggcctataccgttatatgattcatttcctcgcgatcgaaagctcggtcacgtcggtgttcctgatcctgtcgaaagacaaggcaaactaccgtctcaaggacgaactgtgggcggacatcaacaaggcgtcgccggccatcgggcgtgacgtgcggcgcaagctggtgtcgcgcgcgctgaacctgcgtgggtctgtcgggcgctgggtgatccgacgcggctatgtcgtcgcagagaaggtcgtcggcttcaactgacgtgccgcgcggcggggctgccagctgatattcgctcctctatcaccgatcaggagaacgtccatgatgcaattcaccatgtccggaaccatgctgcgcttcgatgagacgacgctgcggttctcattcagccgcgacggtgcgacctggagcggctgcgacggcatagagccgcagctgacgcgcgaggatcgttcattctcgttcgccggcgccgctaccgtcacgcatgagcggatcgagaccggcaccggagtcggcgtgcgcagcgtgttcgccgggttcgcgggtgcggattacgcttttgagacgtatatctggatcgagcggtcaagcggcgacgtgctatgcgaatgggtgccactgcgcgagtgtggggccgagccgcgcatcgacagggtgctttggcctgcgccgctgtccttcgaccatgcggacgcgcatgacgtgacgctcatcacccacgagcagggcgtgatgataccgaataactggcctaccgaggtcggcactgatgcggtctccttcggcgggcggttcgagactgcgggcgggtacatgccctggttcgcgcagttgcgcagcgacgggcatgcgtacatcgccatctgcgagacgccgtggaacgcaggatatgacatcgaccatccggccggcggaccgtacacgcacgtcggaatgtggttcgagccaagtctcggccgcatggattaccgtcgtgtcgtgcgatatcgtctcctcgaccacgccgaccataccgccgtctgcaagacgtaccgcgcttacgtcaacgaacgcggccggctgcgcacgctggcggagaaggcggcgcgcaacccgtcggtgcgtgacctgctcggccgttcatgggtgcatgtcggcatcaagacgaaggttcagccggactcgtcgttctatgatcccgcgcagcccggcaagaatgattcgctcgtcacgttcgcgcagcgcgaacggcagatgcgcacgctgcacgaaatgggtgccgggcggctgtacctgcatctggacggctgggcgcagcccggctacgacaacggccatcccgactatctgcccgcatgccgcgaggccggcggctggaagggcatgaaatcgctggtcgacgcctgtcatgagcagggagacctgttcggcacgcatgaccaataccgcgactattacttcgccgcgcgcacgttcgacccgcgcaatgcgatccgactggcggacggcacgatgcccgagcacgcgatgtgggccggcgggcgccaaacgtacctgtgcgccgagcttgcgccggattacgtgcgccgcaacttcagtgagatcgccacgcacggcatcgcgctggactgcgcgtatctggacgtgttcacctgcaatgaaggcgacgaatgctcgcatcccgagcaccgcatgacccgccgcgaatgctacgagcgccgcgccgaatgcttcgaatacctgctggcgcacggcattctcacctcgtccgaggaggtgtccgactgggcggtgccgagcctggtgttctgccattacgcgccgtacgacttccagatgcgctcccccgacgcgcctcggcacggcatcccggtgccgttgtacaacctcgtctaccatgactgcgtgatccagccgtggatgatggatcgggtggccggtggcgacgactacatgctgtacgcgctgctcaacggcggtgcgccgtacctgatccgtgacgccgcatatgccggcatggacggtgatatgaatgccgcactgcgcgcccgtaccgagaacgacatcgagcggtgtgctgtcgtggccgggctgcacctgcgcgtcggcatgcaggagctcgtgcggcatgaccttgtcggcggcgacccgctggtgcagcgctcggtcttcgccgacggcaccgccgtgacgtgtgatttccacgcgcagacgtatgaggtagcagcgaacggttctcattaagaaaggtgcgaggattccgcacattttcgaacaagcgaacattgcgcaggaagcccggaattccgggcttcctgctgttttcatgttcgcttcccccgtcacacggactcgcacctttcttattgagaaccgttcgctgcgacaagggagcaagccctcagacccacctatcggacatggcgaacgagttgcgcatcaggttgctcgacgtatacagcacgttatcgagcagcttatgggtcagatcctgcagacgcccggccatcgtctcgttcgcagccatgagcgccgcgcggatgtccccggcttcggcatcggcgagcgccgcatccgtttcttcgacaagccggcgcccgaacgcccgcacctgctcgccatagtattcgatcgcgttgcgcgtctcgtaccagtgcgcgtcggcaattacggcgatcagacggttcgtccagtacaggttgtcggtggagacctcgggcgtggtgtcgcgcagatacgccggagtgtcgtccacgttcgcataaaaaggtgcgaccgccgtgaacgggccggaaccgaaggcgatccacatcaccgccgccgctgcggccggcacgtcgtgccgcagttcgatcgcgaccatgtgaccagtgcggttgatgccgatcggacggtagcgatgccggctttccggtgtaccgagcgttccgtacgggtcaaaaggcgtgccttcgaaatgcgacgacatcagaaagtcgatgtcctcgaccgtcaccttgttctccggcgcccggcaccacgggatgtcgtcggaggtcggcgtgtagcgggccgcgggcgaatcccaatcctcgctcgggttcaggtgacgttgcatgtaccaggcgcgcggcgtgttgtagatatggtccttgacggtgctggtgccgaacaccacacgcgggttgatgtggtccggcagcacggcggcgacgccgaaaccggcaccctgcgcgggccgcatggcacggcccagatggtgccgatcgatgaattcgcgcaggtccgcgctgcacatgaagaaccgccgctcgccgaacgcgtcggagaagtcgaagtcgtcgatgcccagctggttggggatcgtcgcatagcagtcgtcgggcacacggcgcgcaatccagtgatgcccaccgattgtctcgacataccagatctcgtccacgtcggaaatgatcacgccgttcgactcataggtgccgtaccgttccagcagctcgccgagccgttccacaccctcgcgggccgaagagacatacggcagcaccagcgtgatgatgtcctcctcaccgatgccgccgggggtctccggccgatagccggcctctcccggcacgccttcggctggcctgagctcgaccagcgggtcggcggcgagcacgcgctcgttcaccgcgatggtttcggtggcgctcatcgccacgttgcgctcgcttgcgccggcctcggcgagcacgcctcggttcggcagcacgttcggcgcgatggtgtagcggcacgggtcgtccggcaggtcgatctcgacatggctgagcgtgctgcggtagtggcgcggctggtccgtcggcgccacggccacgagccgcttgggatcgtagcggccggagccggaatcatcgttgcgggcgatgatcgtcgcgccgctgcagctggctgattttccgataagcaatgtggtgcatgacatgccgaccactgtaggagccggcctcaccatcgcgcatcaacgggacggctgcggcagaaaaaatactgcggaaggccaaatattatgtcatctcagccaaatacgcagggtttcacacgaatttttcaggtaaaccacatgacttgccccgaaacatgcgtttatatagtaatcacgaccgcaaggccgcaataactgaaccccttcttctcttctctctcaagcccggcttccccgccgggctttctctttttccgcgcccctccatcgcggtgtcgcacttcaccaaaacacgggttgaaatagccgttcttgataattccccgtgtcaaatcgccgttttcgggccacaaaacggcgatttgacacggggaattgcggatttcggctatttcaacccgtattgtggcgccccggcccacgcatctaggcaaggcatcgcaatcggcgcagtttgtctggcgcgcccgcccgaccgcacaggcgggaagccccgccgaggccggcaccgcacgccagagccgctccggcaagctgacatccccgatctgatcaacatcggcgtgttctccgcgctgtacttcgcgctggtcgccgatctgattgccaaagccggcaaatactccagcaagatcggcatcctcatcagctacgtggtgttcgcgaacatcgacaccgacacatcatgaattcacgggcaacattcgagagcagccatgcggggcgaaccggcgcatatgcagccggcgcagacggcatgagcagatccaagtccgctcccgcgccagcggccgtcgtcctcggccctcgggcgaaactgtatctgatgctgctcgccaacacgctgttgttcttccacgcggatgcgcgagccgaagcgctgctgacggcactgttcctcacgccgctgttccttgccggacgctggcatatgggactgcggctgacggcctgctatgcggttctgctggggtggggattgtggtcggacgcggcgacgctggacacggcggggcttcgggcgccgcgtcagcctccggctctgacgccgacgcctggatacatgtcgtcgggctgttttccgtggggcttcgcatgatgatgccctgtttcatcaccggtgcctacgcgttctccaccacgcgcgtcagcgaattcgtgtgcgcgccgcgtcgtatgcgcgtgcccgaatcggtggccatcccctgcatggtggtcatccggttctttctgacaatcgggcgggactaccggcgaacccgcgacgcgatggcccttcgcggtcttgcctccggccgactcgcgctgctgcggcatccggcccagtcgctggagttcgtgctggttccgctgttgatgaacgcgacgatcgtctcgcgtgacctgtcggtcgcggcacttaccaagggattgggacggcccggccggcatacctgcataacggagattcacagcgttggtttgattgggcggcgatggcggtctgcacgatcccgctggcactgagcatcggcggcatactatgagcgatgtgatcatacggttgcgcgattgctcgttccgataccgtcaggccgatgcggattcggaggatggcgcctcgccacggggagccgcggcaggagagcgccagcgtcgaaacggcggccggcgaggccgacggattcatcatcgactggctggcgggaccggatcgttcactgggccgctaccggtatcggcttgaccggaccaccgccaaggggttggagggcaaaccctgttatatgtttcatgcgacggacgcgccggcaggctgcccgttcagtgtgctggtggcgatggatccgatgcccgaacgggctgcgctggcgagcggcggcctgctcagtcatctgcattttcagtacgccagcgatgacggcatgctgttgagggcggattccacattgcgcaaacgcatgtggtacccgacgatgtgcgccgacgaaggcacgctgcgcgaccaatgcgacatcgtgcgggccctgcacaagttgcctccgctcgaccgcgaggcataggctcatcgccggcatgatcgcccgtcgatgagccttgacgtgtcacgcgaactggctgttgtacagtgcggcgtaacggccgccgcgttccaacagttcatgatggttgccgtgctcgatgatgtcaccatgttccatatacagaatcaggtccgcgtcacggatcgtcgacagccggtgcgcgatgacgaagctggtgcgtcctgccatcagtcttgtcatggctttgccgatttccgcctcggtccgggtatcgacggagctggtagcctcgtcgagtatcaggatcggcgggtccgcaaggaagacgcgggcgatggtgagcagctggcgttgtccgaccgacaggttcccggcctcgttgtcgagtacggtatcgtagccgtgcggcagcgtgcgtatgaagtagtcggcgcgcacggctttggccgccgcgatgatctcctcgcgggtcgcatcgggccgcccgtaggcgagattctccgccacggtgccgccgaacagccacgtatcctgcagcaccatgccgaattcgcggcgcagatcgcctcgcgtcatggcggctgtggatacgccgtcaagcgttatcgcgccgccatcgatctcgtagaatcgcatcagcaggttgatcagcgtggtcttgcccgcgccggttgacccgacgattgcgaccttctgccctggctcggccacgaagttgacgtctttcatcagcggccgttgcggatcgtatccgaacctcacgtggttgaacaccacacggccctgcacaggctcctcagcgatcttcgccgcgtcagctggctgggggtcgggccgttcctcttcctcgtccaacagctcgaaggtgcgttcggcggacgcgagcgcggactgcagcgagttgatcatgtagctggcttcggtcagcggttcggacacctggttgatgtattggtagaacgcctgcgccacgccgacggtcatgcggccgccaagtaccatccaaccggcgagcagcatcaccgccatctgcgagaaccgcgcgatcatgcggatcagaggattgacggatatcgtgatgaagtcggcgagctgcgcggcttttcgggtgcgttcggcggcgtcctccatcgctgccgcactgtcttcctcgcgattgtatgccttgatgatgttgcggcccttgtagtattcctcggccaggccggtcagctctccgatggtctcctgacgcaatgacgcgatctcgaggttcttgcgggcgaccagtttggttacccacatgctcaatgccatgaacacgaggaacacgaccgtgagcagccacgagtagtagaccatgatgaccagcgagccggtcaccgtggtgatggcagtgatgagtcgcagcaaccccgtctgcatgacttcgctgatacggtcaagatcgttggtgaccttgctcagcacttctcccggcttattgcggtcgaagaagcgcagcggaagccgctggatcttcgcgctgatctgcttgcgcagcgtcaggttgaggttttcggccacggacgccatcagataggactgcaggtagtagaagccccactcgccgagatacaggattgccagaatcaggatcgtccagccgataccgccggcgttccagcttactgagaacggaacgccgtcacgccatgcgccctgcacggcatcccatatcgagtccaccacgacggcgctgtacatcggagcggcgatatggaaaaacgtgaacagcagaatcgacgcggcgaccacgcacaggcgcacccgctgattgcccagctgcacgaacagccgccgggctgtggccatcgcgttcttcggcgcttcgagctcgatgtcgtcggtctttaccgtgtcgcccgcgttcacaacggtttccgtcatatcgtcattctgcgttgtcattctcgtcacgcctcctctcccattgccggctccttggtctgcgattcgacgatttcgcggtacacctcgcagtccgccatcagttcgtcatgtttgccgatgcctgccacttgtccgtccgacagcacgacgatctggtcggcgtgctggacggtgctcacgcgctgcgcgatgatgagcaccgcacgcccgttcgtctctgcggcgagcgcatgccgcaacgcggcgtcggtcttgaaatcgagcgccgagaaactgtcatcgaacaccaccagctgggtgtctccggtcagtgcgcgcgcaatcgacagacgctgcttctgcccaccggagaagttcgtaccgccttgcgcgacgcgggattccagtccttgcggcagcgaatcgacgaactcgcgggcctgcgcgacatcgatcgcatgattcagccgctcatcggaggcatctcggtctccgtaccgcagattgtcggcaatcgtccccgagaacaaccacgcctgctgctgtacgtaggacacgcggcgccgcagatcgtgctgcgtcatcttgcgcacgtccacgccatcgagggtgacttctccccaattggcgtcatggaaccgcagtgcgagcatggcgatcgtcgatttgcccgagcccgtgccaccgatgatcgccgtggtctggcccgtcttgcaggagaagctgacatgtcgcaacgtgtcctcctgcgcgtccgcgaaacggaatgtcacatcgcggaacgccagcacctcgccgtccgggagcggaccgcggccgctcatatccaccgccgcgcccggctccgggtcggcgatctgcggactgtggtccagcaccagccgcacacgctcgcagcattcaagcgccctcggcaaggtgatgatcaccatctgcgccatcatcagatagaacagcgccatgatcgcatactccacgatggcggtgatgtcgccgatttggaagtttccggcgctgatgcgtcctcccgcgaggaaatacacgacgacgatgaatgcgttcatgccgaagtacgacaggccgtcgaggttcgcgaatagccggttcgccttgatggacgtatcggcgtagtcgacgaacgtgccgtccatgcgccgccgctcatgggattccttgttgaaggcgcggatcacgcggacgccggtaaggttttcgagcaacacggcgccgatgcggtcaagcagtttctgcagtttgcggaacaacggcgccgcggatcgcatgatgaacagcgccacgacgcacacgaaggctatcgccaccagcagccacagagacagggtcacgtcaagccggaacgacagggtcagcgcgatgatgaatatgatcggcaccggcatcagcatgcacagcacattggtcatggccatctggatgttgaccacgtcgttgatcgttcgcgtggttatcgatgccgtaccgaaattgcggaaatcatagatcgacagatccatggatttgcggtacagagccatgcgcatgtccttgccgacgcgagaggtcaactgcgagcagcaccatccgcccgccacggcgcacatgccggaaatcagcgcggccacgcccatgccgaccgccgtgatggtcatcttcttgaatgatgcggatgtcgcgctttcgttcagcagctccgcggcgaatgtgggaatgaccagcgcgccgacgacatcgaccagcagcagcaccgtcgtcaccgcgcacagcgcccagtatggcttcatgaaacgggcaaccagccgcatgcttcttccttcccctcgcgaaatcgtctacgctcatatctcagtattgtcccgaagtaggacaattgagccatacggcgtggcgaagtccgagacgggaaaaactacacggaaatgtcatgcatctgtttgcggaacacccgcccgtagacgcccatgcccttgagcaacgcgctgcgcagctcgtcaggaagctcgctcatcgcccgatactccgcggcgcgactcggcgcgatcaagccgttgcaatatctgcgcccggcaggcgtgaaacggaccgttttgacccgacgatcgccttcggcgtccccaagctccacgaacccatgcgccacaaacgatgcgatgacattgttgaccgtctgccgcggcaacagcgtgtactcgcagatcgcccgctgcgacgccccatcatggtccttgaggtagtccagaatgcacatcacattatccgacactccggctcggcgagcgtaatccgaatacgccacgtcaatgcgatgcagttcatcgaagaacaaatcgatatgactcgtgatcgatgacgcttcaatatcccgagccatgtctctctcgccgccatgccccacagcggcattctctgaattgtccgacataaggacaatcatacaggcatttcagcaattgcgccagagggaacgcctcgctgccgcaacagcgccgacacacgattaaatccctccattgaagccacggctcaggaagccattgcgtttgttctgtctcaatgtcccgggcgacacacgcgaggtggttacgccgatgacgcacacgaatggaacagcaaaggatgcgacaaatgctcacgatgaccgatacgccgcgccgtcagcacgcgatcagagtgtcggctgaatggggcatggcaggggaatgagatcgccgctagcgtcatagaactcacgtaggtttatggagcgcacggactttatacccagcagggacaagccatcggaatagggcaggctgccccgttcgccaccgttgcgaaccatgcgcacgaaccttgtgtccagatgggatgcgttcgtcagattctgattaccgcctgaaccagcggtctccgcatccatcacatgctgttcgctcagggtgcgaatcaggctcacgtccctgtcactgaccaggccaagcccatgagcgtgaatcgtcaacgccaaagcactcagaccataccttctcgcacaatcatccgctacatcctgcacgtgagcaccgtctgcgatcattttcttccaatacgcgcggaatgccgcctcatcgtccacaattgtcagaataactgcctgattgattttgcgttcgacaccgctgccgccgtctatggaggaatcattgcggttgatgaaaatcaatggagccacgtcatccaacagcacgaatgcacgaaactcacacacgtccaaacggcgtgcgctggatgagcctacccgagaatcgaccatcaccataagacctgcatcagaagacttgccacgcaggaagcggaaccgttcggcattgcttttatgccgacaccagccggccgtcaaagacagtccttcacggatatgcgaagccagttcatctgcggttgcgcgagacggcacactgcccaccagcagattctccccgaacccttgagcaatcatctcatcacgcgcccaatcctgacgattgcgcatagtaacaatcgtatctcgaagattccggctcgcttcgactccctgattgttaatcgtccgatatctaatcagatcgtcttcacgagcttcaggaaccacggaacgcatcaacgcaccaaacggcatctgcaacgcagaaccaatcgtggatagcttggtaaaagacaagtccaacggagcatccgcatttagccattgaggaagctcggcaagaccatctctatgtgctacagccaccggatcagctccgctctgtctgacggcccaccggagcgcgtggctggatgtacggtaatggacgccatcgtcacactgccctctgatatcgcagatgaaaagatccgccacatgtaagagcagcagtcacggcttcaggcgggtattggtaattttcatgatatccgaatgttggatttcaacacgagcaatgaatcaacggaaggaagcacctcccatcaggcccctactagggtcgaaagtcaatggcaagcaaaaagtccccggaaacgccgatttccaaggacttaaccgtgccccctgtgggattcgaacccacaacccacgacttaaaaggacgctgctctaaccgttgagctaaaggggcaacattaccaagatacacgcgaacaccggacaatgtccagtacggcgttgcgcgcaggcggcatcttgcgcgcgctgactgacgaccacccccagtcgctacgcgacagcccccgccagcggggggggcaaaagatggcacagtccctacgcggcagccctccgggccctgcaactacggatgtgctacgcacgaccattctgctgctcgcctgtcagctcgacttcgcctacaaacagctccgctgtttgcttaacggctcagcccgccagcggggggggggcaagacagcagtcgccccgcgacgcgctgaatcagatcaggcctagggtgacgaaggcgttggcgataccgtcgtcgtggatgtcggtggtggtcatgtcgcagaaacactcgatgccatgagtggcgttgcccatcgccacggatgtgcccgcggccttgagcatcgcggtgtcgttgtcgctgtcgccaatcgcgattgtgtcggcgatgctgtagccgaggtccttcgccacatcgcacagggccgtgcccttgtcgacgccgttgatgagcaactcgccgttgttgggcgaaatatcatcgtacgagccgtgaaccagcgtgaaccactcccccaaatcacgcgatacgtcatcaaaactcacatcgggatccgctccggagaaatacgagcccttgctcgcatggatgacatgccccagcgtggaaccgtccggcaccgcgatgtcgtcgatcagatgccagtaccgcgcgaactgaccgttcttccacacggccgaccccttggattcaagatgccgcgcatacccgcacgagatgtacatgccgtccgcgccctgccactggtagttctcgatgccgtgccgttcgaaatacgcggttgcggcgtcgatcgcctcgggcgcgatgtcatgccggaacagcacccgcccgttgacgtccgcctgcgctccggccaccgagatcacgccgtcgaatccgagatcgagaatgccgcgttcgatcttcggcatcgagcgtccggtgcagatgaacagcttgtggccgcgcgaccgggccgccttgcatgcctcctgcgcggagatcggcacttcatgccgttcgtcggccaatgtgccatcgatatcgagaaacaccagtttgctggacattgccacccttcccgcgccttctccaggcgcttccggtgcaccagtgtaggacttcgggcggtcttgcactccgcccggcccggcacggcccggctcggcacagccccgcccgcgcacggcccacgacctacatgcgccctgccctggacgggtcgatggacatggtctggaatcggttcgccatgaaatcgttgccgaaatggtcggcgaagaactgcgtgatcggcgaatccagcgcatgccccgccatgcgcccgtaccagcagtcgaacgccatcaatgtcatcatgccgtcgatgaacagcagcacgaacaccacggcggtcagcgaataccgtaccttccacggaatcaggttgatgaacttcagcaggtacggcagcacgaacttgatccaggcaagtcccataatcccccagaacaccatgtacttgccggaggtgcgaccgcctatcgacagccattcgcccgtgtaatcccaggccttgataccgaacgcgacctccatgaaccagctggagcagtactcgaacacgccgccgatcagagcgctggagaagaagatcagcacccagttcgagcgccacagccggttgagcagaatcgtcatgaatccggcgccgaacccgtagatcggcgagaacggcccccacagcatgccagcgcgatcctgatattcgccgtagtaataccagtgatatatcgtctcgaccaccagcccgatcatgcagccgatgacgaaaatccagaacaggttgaagaaatccagcgagatatagcccttgccgctcatgtcgcggccaaccatgcccttggcgagcgccgcctcgtattcgtcgcgctcatccatgcgcctgagcgcgcgctgcagccgccgttcctccagcagagtcgggtcaagggttatggcgagcgcgaccagtatggtcatctggatggacggcacgagcagattcgcgcccaacccgtccaatgcgagcgacagcagtccctcggcgaacgtcaccatcatgacgatatacgaccaccaggcggaataccgccgtcggttgcggatcagcagcacgcccagcacggtcaggcatgccgcgttggcgctggagaccaccgtctgggcgcatgtgaggatgaatgtcaggttcagcacgtcgacggtcacacggccgtcgagaatctcatgcaccgaatatcccgccatcagcacgatgacggggagagtgatgacgccctgcagcagcacgagcacgccgtagacgcgggcgatcagcggcagccgcctgtccgcggcatccttgccggagtggcttttcgcttcttgttcgacgtcggcgagtaccgcctggttggcgagtgcgtcgacgtccgcggcgagctcctgcccgtcgcgacgctgactggtcgtgtcagaggccatgcgtcagcgcttcgacgagcgtttgccggcgttcgcggcgttgacggcacgcagcagctgccaatcgcgtgtcatgtacatgccgaaggccacgccgaacgcgatcagccccaccatgtcagcggtgaacagtgagaagaccatcacgaagatcatccagccgaccgtccatttgaaccgcggaccgggctgcatgtgcttcacggccatatatatggtcaccgcggcgactcccgccgtcacgatggcgtacaggatgatgagcgccgtgttgctgctgttgcggctcagcgcggtcacggcctgagccgacgtccgggcggcctcggacgtactggaaatcacgccgaagtacgacagcgcgaagaagatggccatgccgaccgaatacacggcaccggcgcacatgatcacacgttccggcgttcgtttggagaatggcgagcgcgcattggctttttcacgctcgcgcagatagttgttctgcttggatgtcataacggcgatacctccgacgtcggtgtacgaatcatgttccatcgtaatacagtcagatggattacgctccttgccggaaagccgtgccgtgcgcgggctggggctgctacaccacgcccagccgctcgaaggcgtgcgcgaggccgctcacgtccaccgcatcggcgacccaatcggcggcgtctttggcgcactgctccccgttgcccatcgcgatgccgatgccggccacctcgatcatggtcagatcattgtcgctgtcgccgatcgccaccgtgtcggcgagcggcacgcccatggtggccgcagcgaaacgcagtccctcgcccttgctgccaggcaccaggtcgccgagcgtaacgccatcccgccgcgcctgctcgcgcgcggcgggattcgggtttacagctcctcgccgttggtggcgatgacgtgctggtaccagccgaaggacttcttgcggctgcgcttgtacgagccgtggcctgcatcgtcgccgtccacgtagatcaggccgtagcgcttcttcatctcgccggtggtgaagctcaccacgtcgatgcagccccagaccgtgtagcccatgacgggcacgccgtccaggtcgatggccttcttgacctcggcgatgtggctcttgaggtattcgatgcgcgagtcgtcggcgatgtagccgttctcgtcgggcgtctcgtacatgcccacgccgttctcgacgatgaacagcggcttgttccagcgctcgtacatctcgcacagcgagtagcgcaggccgaccggatcgatctgccagccccagtcggtggccttgatgtacgggttgggcaccagcccgtcgaggccgtgctccatcgcgtcgagcgtggagccctgcgagctgacggctacggacatgtagtagctcagggagatgtagtcgacgatgccgtccttgatagcgtcgaggtcgcccggctccattgcgatgtcgatgccgtcacgctcccaccacttgagcaggtagcgcggatactcgccgtgcacgtacacgtcgccgaacaggtagcgcttgcgcatctgctcctgggcgagcatgacgtcgtccgggcggcaggtctccgggtagatcggcacgaaggagagcatgcagccgatctggaagtccgggttgatctcgcgtccgcgcttgaccgcgatggccgcggcgacgaactcgttgtgaatcgcctgccagaccttctgctccacctcgtgcggggtgtcgtccgggttggggatgatgccggagttcgtgtacgggaagatcggcgtgtgcatgttcatctggttgtcgacctcgttgaaggtcagccagtaggtcaccaggtccttgtagcgctccatcaccgtggtggcgaagcgcacgaagcagtcgacgaccttgcggttggtgaagccgcccatcttggccaggtgcaggggcatttcgaagtgggagagggtgacgaccggctccatgcccttggcgcggtagtcggagaacagctcttcgtagaacttgagtccggcctcgttcggctcctcttcgtcgccgttcggaaaaatgcgggaccaggagatggatgtgcggaagcacttgaagcccatttcccggaacagcgcatcgtcctcgcggaaggtgtgataatagtcgatgccgcggtggttcgggtagttgagcccgtcgatcacgctgtcggtgatcttgcgggccacgccagccgccccgccggtgagtacgtcgcagatgctcgggccgcggccgtccacgtcccatgcgccttcaagctgatgtgcggcgaccgcgccgccccagaggaaattctcgggaaatcccatgatgcttgttcctttacttgtgtttgccgtacgtgatatgcgcgtcgtgcgccgaaggccctcagccgttgagctttcgatacaggtcgatgagctcggtgaccatgagcttcacagtctcggtcgacatcatctggtcttcgacgtgggtgagcagcagcgacatcgtgaccgggtcgccggccgcctcctgctgcaccagcttcgcgtgctgttcgtggccggccgcgtactgctcgtcgccggacttcatcttcgcggcggcggtctcatagtcgccggccttgacggcctgcagcgcttccatgtaatcggatttcgcagagccggcatcgacgatcatctgcatgcacagcacttccatgtcaagggtttcgggtgcgtccgccattggactgtcctttcgtcggtgttcgccgcgccggtcaccggctcgcggcggacggtcattcgtggggttgggtgatggggaatgagggagggattgagggagggaatgcccagcgccgtcgtatcggacgacgccgggatagggagatcacttgccggcgagctcgatcgcgtggttgagcacgttctcgccgcgcaccaggccgtagtcctgcgggttgatggattcgaccgggatgttcgggaacaggcccttgacacggttcagttcgaagcgcacctgcggtccgagcaggatgacggccgcgtcgggcgccttctcctcgatctcggagatcgggtaggcgtcgatctgcacgtcgacaccgttcttgacggcggcttcgcgcatcttcttgacgagcatggaggtggacattccctggttgcagcaaaggacgatatgcataatggtttcctttcgtggggtgcggccttgcggccgcgctgttgacttgttggcttgttgagggggttgggttgaagttgtgtcgtgcggaccggtcgccggccgcagtggccggccggcggcctgacggttactcggccgcggcgtcctgctcctgcttgaggcagatcttgtcctgcatcttgacgaacgggaaccagatggcgatggaggccgcgaagatcagcacctggatcaccacaccctgccatccgccgagcaggaagccggagatgatcggcggcgtggtccacggcacctgcatggcgccgaaggcgggcaggaagccgatgaccatggcaccgtaggtgaggatcacggcgaccagcggggcgcaaatgaacgggatgagcatgatcgggttgtagacgatcggcaggccgaagatcatgggctcgttcacgttgaagatgccggggacaagcgacagcttggacagctcgcgcacctgggcggacttggcgaccagcagcgccgcgacgatgaagccgagggtcaggccgacgccgccgaacttgcagaagcagtcgatgagctgcggcaccagatagtggccgccgttggcctgcgtggccttgatgccctggtccatgaggttctggttgaccagcgagttggcggtgagcaccgggtagatgatgccggagacgatgttcggaccgtgcagaccgcaccagaacagcagcgacatgagcagcacgatgatgatggcaccggcccagttgtcggtcaggccctgcatcggggtctggatgatcttgaagatgagctcggtcagcgaaacgccgccgaagacctggcacacctggtagatgatcgcggagtagcacatgatgaagaagccggggatcatcgcggagaaggcgttcgatacgccttcgggcacggcgtcgggcatcttgatgcgcaggttcttcttgatgcaggtggtgtagacccacgagccgatcaggcccatgatgatggcggagatgatgccgttgccgcccatccacgtgttcggcaggacgttggagatggtggcggtgtcgccgcccagcgccttgatggtgtcgctggtgaccgtcagcgtggagggcgagacgatgaggaacgagaccagcgtcaggatgccgcaggagatgccgtccatcttctcgttgcgggcgtaggagtagccgatgccgacggcgatgaccatcgcgagcacgttgaacgtggagttgttgatctggttgagacccagattccaatcgctgccgaagatccgggccatgaaatcggtgtagccggtgatcggcaggtttgcgatcagcaggaagatcgagccgacgagcgtgatcggcatggacagcacgaagccgtccttgagcgcggtgatggctttggtgctcgcgaatttcacgaacacgtcaagcgtcttttgcgcgacgttggtgaacctttccttcatcacaggagtccttccttggacatctgcggacttcgtagtccgcatcttctgttgtacttccagcacggcttttcagccttcagttattcgatatactttttgttgttcgaataacttgtgcttttagtatacggattatggaaatcctgtcaaatatggtcacatcgctgttattacaccgattatcggcataattcagccattgtcagcgctcactggtcaagattgcgacacgccggtggtcaaaatttattcgaataaattaatcgtttttacttcgacggctcacatcaggccgagccgttcgaaagcgcgggcgagcccgtcctcctccacatcgccggcgacgatgccggccatcgccttgatgccctccgacccgttgcccatcgccacgccgaccgcgcagtactccagcatcgggatgtcgacggccgcgtcgccgaacgcgacggtgtcctgccgattcgcgccgagatgcgcgagcagccggtcaatcgcatgggccttggtgacgcccttgactccgagatcgccgaacagcgccgtcgctcccctaccgccccacgtgcccgattcgaggtcggggaaacgcccgcgggtgtcgaggaagtcctggtacgagccgagcacgtagctgatcttgttcacgtcgtcccggtacagttcaccgtcgaagatcatgtcggggaacgcctcgcgcacggtcaggcgattgacgttctccttgcccttgcgggcggaatactcgcggatggcgtcgagcgcgccctcctcgaagccctcgctggcgaacaggccgttgttgctttccagatagaattcaaggccgcgcggatgaccctcacggccgagtccggcaggttgttgtcgtagtcgaccagtgtgccgtccacgtccaacaggatgatcttggacatcgtcgtccgcctttcgtcgatggtcgtggcggccatgcggccttacgagcggagccggctgccgtgcgtcagcgcatcgaggtcatcgtgaagaacctcgcgttgacgtaatggtatgcgatgaacgaggagttgaacagacggccgttggtcaggaacgagtcatcctccaggtacagcgcgggatcaccctcgttcagaccaagcacccgggccgcgtccgcctccagcttgcccgcgtacagcaccttgtcgacgaagccgaaattcagaccgaggtcgttgcgcgcatacccgaacagcgacccctcggcgatctgctcattgatgaacggcacgaattccttgagataccacgccgtctcatatgccagcggattgccgtcgacctgccgcagacgcacgacacgccacacctgatcaccctcggcgcagtgcatgcgcttggccagcacggagtcggcctgcagcagcgacaactcctgcaccacggacgtcaccttgcgatgcgggtactccgcggaaatgccgcgcgtggtgccgatcgacaggtaatcgccctcacggtcctcgcgcacgaacacgccgctgccccgcaccgggaacacgtcgccggcctcggcgagcaccgcgatggcattgcgcacgcggtacctcgtggtctggtactcctctatcagctggtcctcggtgggcagcttcccggtctgccggaactcaccggcatcgatacggcctctgagagtcgtggccaattcgcggtaatcctgagccatcattcctcctaccgtctgattccgcccgatgcagcggcccccatcaccgccagagacaccgcatcccatgacatcatgattttatcgcacaacacacggttattcgaataacaacatgtacaatcgtacatgataatcgtaatatcgtgcgcctcggcaccccttatacgacaatggcgcttgggcgacatgccatgccacccaagcgccatacgaaccgacatgcgattattgaatcgaggcctcctgccgcgcgacctccaacgccttgttgaaggcgtccgacgtccagctggctccggccaccttgtcgaccttcaggtccttgagcggcttgccatcgaccacgccattgattgcctcggcgaagtcattctggtggttcttggagatcgtcgtgaacggatgccccacgatctcgaccttctcgaccttctggtcggcgatggtcaggtgcacgtcgatggaatcctctccgaccggcccgtactggccgttgatcgaataggtgccgtccttgtagttgccggtgtccttcttgtcggaggtcgtggacttgcgcttggaggagctgtcggagccgctcgatgactgggactcgctctcctgcgacttctcggtctcgccggaattgccggcatactcgtcgttcatcggcgcggccttgggctcgccgcaaccggccagcagcgtggtcgccgcgatcagtcccgcggccgccaccgtcacgctcttcagcgtgcgggatttcgacggggaaccgccgtccgcaagcccgtcatgctgcagagcgctgccgtcactcatggtcaccacctgtcttcgccgccttggtaggatcaatgaaatcaatggaagaatcgccatgctgcgcaccttcggcgtcagaaccggtggacgcaggcttgccaccggccgctacgtacgcatcatgtgcatttttatcattccacttctcgcccacgagcacgccgtggttgagcatgatttcacgctgggcgcaactcgccacgagagcgtcatgggtgaccacgatgaccgtggtgccctggtcatgcagctggcggaacaggtcgaggacgatcttctcgttcttctcgtccaggttgccggtgggctcatcggcgagaatcagcttcgggttgttgatcagcgcacgcgcgacgcacacgcgctgctgctcgccgccggacagctggctcggcagatggtgagcgcggtccttcagaccgaccttcttcaacgcctcaagggcctgcttctcgtcgacgaccgaatggtagtactgcgcgaccatcacgttctcgacggccgtcaggtgcggcaccagatagaacttctggaacaccaggccgatcaggttcttgcgcacgtcggcgagctggccggcgttcagatcctccagcttgcggccctccagcgaaacggagcccttgctcggcgtgtccatgcagccgatcatgttcatcagcgtcgtcttgccggaacccgacgagccgacgatggccagccattcgccctgcggaacggtcaggctcagatcatcgaccgcatgcaggtcgccgtagatcttggaaatatgatcgagttcaagcagcatatccatgattattccttaactattccaactattcctcgcgcagcacgaccgcggggtcgatgcgcgtggcgcgatgcaccggggggatggatgcgacaacggcgaccagcgcgctgaacaccaccgacacgacggcgagccaccagttgaaaccgatggaacgctcaaacacggtggcgcacagccagcgagccatgccatagcctgtcgccgtgccaagcaggccgccgagcaggccatacaccgccgattccacatagaactcgacgccgatggcatgcgagctcgcgccgagcgccttgcgcagaccgatctcgttgcgccgctgcgagacgatggagctgatcgtggtgccgacgccgaccagcgtgaacaccagcacaaccagcgacacgatccagaacagcgtctgcagcatcgtgatgacgcgcgtgtcggaagcggtgatcttggtgacctgctgcgccttgacatgcatcgacgtcatatcgttgatgctgttgaccagcgcggtgaggtccgaggcgcccgacgagtattcgatgacgtccacgccgcgcgtggagccggtgagcttgtccacgtcgccggccagcgcgtagatgatcgaatcctcgctgccgccggtgtcaacgatgccggccacacggaactcggtaccggacgtgtccatgatgtcgctggagacgtggccgttctgggtctgctgggcgccggtggagccggacgaggtctggccgtctgacgtgccaccagtgccggactgtgccgtgccatcggtgccgtcagtaccgggctggctcgcctgtcccgaggacgcggcgttgtctgatgcgcggtagccgatggtgatgctgccgccgaccttcaagcccatcgcatcggcgacgtcccggccgaccagcaccttgcccgcggacggccaggagccgtcgacgacccaatgatggttgaggttcctgacctgcgcggggttgacgccggccatcacgtacggggccgcgttgacgcgcacgttctcgtaacggtacgtggcgtgcttttccgagcccttggcgctcaccatctccgtggtgtgctcgaccatcgcgtcatcgatgccggacttgccgttctccgaatcggcgagcggcgtcacgatcaggttggcgccataggctcgcatctcctgattcatctgctgcggcacggcgatgcagatcatcgccagacaggacagcgtagcggcgccgaccagcgacgccaccacggccatgaccgcgcgagaccgcctgcggaacaccgcactcaacagcatcctgaagaacataccggtattggtcatctcagcacgcctccttcatcatcgtcttacgatcagcgtccatgcagcacctccgccggcttgaggctcagaattgagcgaatcgacgacgccgatgccagcagcacggtcagcgccagcagcacgaacaccagcacgaacaccatcgggcgcatggtgatgcccgaaccgaacaccacctgcccgatgatctgcgccacgcccgagcccaaagcggcgccgacgatggctcccagaagcgagatcgccgcggtctccgccatcatcaggcgcgacaccgcgccatcggtcgcaccgatcgccttgagcagggccagttcgctcgaccgctcgccgatcgaggcgaccatcaggttggccactgccacggccgcggcgagcaggctcagcaccgtcatcaggatcatcacggcctgggtcttctgcagcacgttgccctgcagcgcggcgacctgccgcacctgcttggcgaccgcgccgggaatgacctcctcgatctgataggcgattgagctggggtatgccgtgcaataccaggtctcccactcgtcttggctgagcgcggcggggttctgggccgccttgcgcgccagatcgttctccggcgttgtcagcgccttcacctcgatcttgtcgacggagtccggcaggtccgacagcacctgtgccaccgacgaggagatgtagatggcactgttgtcgtcgtcgccggaatcgtagacgccggtgatgcgaatcttctgctcgtgcgtgttcccggccgccgtggtcttgcgcaaggtgaccgtatcgccgcgtcccacgccgagctgctgcgcgagcgtcgtgccgatcacgccctgatcggtgtcatccttcggccagctgccgtcgagcttccaccatgagcgcatgccgtcgacgcccacgacggtggtctcgcccgacgcgagcttcagcgtcttgttgaaccacgtgccgactaccgccgccgccgtgccgttcacctgcgcgtggacgttgagttgcggcgcgaaattcgtgatgttgaacgcccaaaaaatcgtcttgatcttcgccgcgtcggactccttcaggaacgaggtcgggtccgcgccggactgcgggccgccctccatgttgtacaggtcggacaccaccgcatcggacttcggctgcacggtgatgttcgagccatatgtgctcagctcggcgttgagcttgtcgcccacgtcgaacacgacgcccagcatcgacaccgacaccgtggccgacaggcacacggtcagcgcgatcagcaggcgcctgcgtaactggcgggtgaacgagcgcctgatcattctcagaaagaacatggtctaaaccccttcctgccttactggaagtgggcgctcagcgcgtccaggtcggcggtctgaatggtgatcttgccgctaccggtcttgtacgggaacgggatcgggttgcacccgcccttgaagccgatggtcgccaggttgatggccacctcacacttcttgcagatgatcttgccgtccttctcgtagtatccggcgtcgccgcagttctcgcaggcgtcgaggccgatgccgtacgcgccgccgttcttcttgatgatgatgaagcgcatcacggtgccgtccttggccttgtattcgaagcggtgcaaatggccgtcctcgacctggctgaacgggatcgtggccacgccgtccttgagcgaatacgcttccggcggcgagagagtcggctgctggttgattgcggccacgcccaaggtcagcgtcgcggtaacgccgatcatcgccaccgcgctccatgcggcggcggcgatcgcacggcgccggaacgccttgtgcttgcgcaccgtggccgcattgacgtcggccgcgagtcgcttcgcagaaaccggcatacgcaagccggccaccaccgaggcgacggcgggaatcaggaatatgaacgcttgggccataatcaaaccggacttgttgttgatcagccaggcgagcatcacgaacgcgatgtgcgggaaccgcagcgtgcgggcctgcatgatctgcagcaggccggtcagatgctgcatcagctggatcaccagcaccaccagcaccgcggacaggaacgccggacggaccgccgtcgaacgcatcgtgcggaagatcgcggcgatgaccgcggacgcgatgatgcccagcacaaagccgagcgcacgcagcagcatatcggacgtgaagatcgggtctcccggctcgacccagatggtcagctgcaggatcacgtccggcagcgcatagaacacggtgagcgcgatgcccaacgccgccaccagattggcgagatgcatcaccgcggcgtgccgacgccaattgcgggtgatcagtcggttcacgaacaccaacacgatcagcaggaggtcgatgaccacgcagcaccacagcaccgggtagttgatgaatgtacgctggttaatcaccgcggatgcacgcagtccggcgaacacgatcgccgccaccaatccgatgaggattccccacagacgccatcgggagctgatcggcttgtcacgcccctcgccgacggtcagcatcacactcatgcacatgaccagcaacgcgggccccagcgtgcccggcatcaccgctacgaactgttcgagcattcgcaccctttccttgttccgtctattatgttccgttcattccgtcataaaaacagcgaaagctcctctcgggcagagaggagcatttcactcaggcaatgtcaatcaccactgacgcggggtgtattcccagttgtcgaaggtgacctcgatcggctcggtccagaagcgacccttgacgccggtctcgggatcgacgtgcagcatccagcccttcttggccggggattcgatcgacagcttcagctggtaggtgccggccttgtcgagcttgacgttggcgccgtagtgcgggccgtcggaggcgttcatctgcatgaaggtaccggaggtggccttgccgccttcgacttccttgccggtggacttgtcgatgatcgtgtagttcacggtcagctcggggacgaagtcgcccttgccgtagcccagctcggtacccttctggttggcgtggatgtcggcttcgaggtggaagctcgaatcagcggccttcaggcccatggaggcgggctccatgtcaatcggctggaagtacacggcgccgacggtcagcgggccggcgtccttgtcctgctcctcggcggtgccggacgggccgaccgggacctcttcaaagcctgcgccggagctggagctggagttgtccttcttgtcgctggactgagaggagctgcccgaagacttgttgtcggaagcattgttggtggaaccgcacgcggacagcgagaaggccatggaaccggccagcagcacgccgagcagggcggcgatcttcttgttcttcatcatttctctatttcctttgttgtgtagtgaatggtattcacagattgttgggttgattgttcggggcaccggccgtcacggcagccttggccttcgccttgcgctgcttgatgaagccgaccacgaacagggcgatcaccgcgatggccgcaatcacctgggcgatgatgcattcgacgtacgggtagaagccgatccagtcgttcgtcggaacgccttgcagatacgttgccgggagtgcgtcgccctcgatcagcgagtgcacgccgccgccggcgaacacgaccaccagcaccgacatcaggatcgacgtgaccaggaagaacggtccgatcggaatcttcaccgacgtgaagcgaatcacgaagaagatgaccagcagcaccactgcggctgcgacggcaccaatcaccatgccatgcgtatcgcggctcatcgtgtaaatcgactggtagaagatcaccgtctcggcgccttcacggaacacggcgaggaagctcagcatggcgagcgagatcaccgtacgggacgcgactttttcgccggcatcgacctgtgaggagacggaggccaccgcggcttcggtcttctccttgatgtaccggttccatgcctcgacgctggacttgttgagcatccaattgctggtccatagcagcatggccatggcaatcagggcgcacacgccttccatgatctcctgaatcgggccggacccgccgaacgcgagcacgaagatgaccgcgaccacgcctgcgccggcaagaccggcgagcacgcccacatagatccacttggtgaaacgcttgttgccggacttgacgaggtacgccaccacggccgcgaccaccagcagcgcctcaagaccctcacgaatcagaatcaggaacgcctggccgaccgagctggtgatgaacttggtgaagctgccttccttgtcggcggcaccgccgtcgagcttgccggcgtcctcgaccagcatggccttcaaatcgtcgacgagcttcttggtgtctttgaacgaggcgcctgtgttcatcgacttgcggcacatcttgaactggtactcgacctgcgagacgcggtcgccgctgatggcgttcatcacgttcttctcgaagccgagcttctcgtagtactggtagtaggcgtcgttgacgagggtagcgcccttcgcgccgtcgccgcccgcgtacgacttgtaggccttgtcgaggatcggcatcatctcgttggccacgtcggtccagctgcggtcgcccttgccggggttcttcttctgcttggactgcagaaccttgcgctccttggcgatctgctcctgcagcgccttgtcgtagccgcggggattggcgagcttggtgttcgcgtcgagctgcttggcggtgctgtcgaggtcggagacgagcgcggtcacgctctgttcgatcttcgcctcgttgcccgtcacatatgacaggtcctgaatgtcttggaacgcctgctgctgggaggcctgcttgtcggagccgatgttgtcggtcacgacctgggtgaagttggacgccacatagatctcgttgtatgcggccatgaagtcggacgtggaaccggcggtgttgccgtccttgtattccttctgcccctgctgcagctgcttgtccatcgcggcggcgacgtcggcccatgtgtcgtaatccgcggaaccgtcggcggccatcgcctgcggggcgaacatgacggccatcaccgtgaacagcgccgcgacgacggccagcgaacgacatccaaccgcccgaagatgcgctaccgcacgacatcgcatattggattcctctccatatcaacgctttctaaaccatctatgcaatatagagaaaaaaaacctgaaagaacagtcttgacttttgaatttttatgcggtaatagagcggcccctgaggccgaaatgtctcatattgtggtcattgtatgggtggcccattaggggccgctctcaaaactcacagatacaagacgtttttcgggtttttccccttgtatctgcgagttttgagagcctgcttcagccatcaagacgattcaacatcttccgctcgttgtagaacgcgaagacgatgcctccgatgccgcacagcacggccgcgcacaccgcggcgatgcggtagcccgcgcccgaggccacgccgatcgtggagacgccggtgaacagcagcatcgccaccgactggcccatcttcatcgcgaacgccagccgtctgacccatcatcatgtggtgctgagcgacggcagcgtgcaacggctggacaccgcatcctccagcgggaacccctaccgtcccatctcatccggaggcctcaaaatctccggcatcaacgtaggctaaggcggctgcccccgctggcgaaatgctacgctgaggggcatgagcggattgcatgggcggatgccgtatacgactgcgtttgaacgcgcgatgggcaccggaatgatcattcagtcggcgacggccctcgacgacggcttccgctcgaaactcgacgcgttcatcgacgggtacgagtccgtgctgtcacggttccgcgccgattcgctggtgaccgcaatgggcgaatcctcgcatggcggctcgtttgattttcccgattgggcctccgggctgttcgatctggccgatgcgttctgcaccgcgaccgacggggcgcttgacccgtgtgtgggcgaggatctgatccggcttggctatgacgcacggtattcgatgacaatggaacccgatgcggagcatcatctcggtgccgtccacgggcgcccgacatggcgcaacgatgtggagcgtcatggcacaacgctggtgacgcagcgcgcggttcacttggatttcggggctttcggcaagggatattgcgccgatctgatcggcgcgatattggacgggcacgcgggcgatgaaaccgtccggcaatccgccaccggccccggctctcacgcgccctacatcatcgacgcgggcggcgatctgctgatccgcacgggcgagtctgctcaaccggccccactcgccgaggggtcaggacacgacaccggcgacaccgtcaccatcgccctggaggatcccgctaaccccggaaccgaggcgatcggcatcgcaagcatcgttgacggggcgttctgcgcgagcgcccccagccgacgccattggagtgaggaggcaggccgtcagctgcatcatctgctcaacgcggtcgacggccgtcccgtgcgcgatgtcgccgcgagttgggtctatgtgccatcggcggctggccgaccctaccccaccgcgctggcagatggactcgccaccgcatgcttcgtcaccgcaccggacgagctcgcccgcgcattcgacttcgaatgcgccgcggtgcacgccgaccgcacggccatcatgagccgtcacttccccggcaacttcttcaccgtataaacaatgcgggagggagcacctgcgtcatgccaccgccaggttttcttgtgcctattcgccacgctcgcacatcagtggcgccgacacgtcaatcgccgcgccgagcggtgcagcaagcaccttatggatgtccggagcgatatacaggttgccccttccggccggatacgcacggagtatacccacggacaccagacgagacagcgcgtgctgtacggccgacgggctcttgccgaaccttctcctcaacatactcgccgtgacggtgggctgcccgatgaggtacatcgccgtctgcacggacaggccgctgtatctgtgctcatccaatagactgcgatacctctgccgcacattgacaagacgcttcacgcgtagcagcgcgtcctcacaggattcctcgatgttttggcagcaggcctgtggattgtcggacttcgtgcccttcacaagaagcttctgcaattcgcgcacgagagtgcaggcttatgggatgcccggactgaatctggcctatgccgcattccgccgcgtcgaggtagttcagcacctcgcgcatgaactcgctcagcccgcttttgtcctcgcccacctcataatcctgagcgagaacggtttcgagcggctcgaacgtgccttccagggcgctggtgctctgcgcttcgcgacgcatggtcgggcgacgcagcatatcggggttaggcaggtcctcccccagctcgccgggcgcatctggcgcgaacatttctttctccataacaccagctgtacattttttttaaatcattcatactaagatttgcgaaatcttagtatggacaatgattaatcatgcgctttaccgcacctcatcacaccgcatatgcaaaagcgacgccgtacgcgagccggcaaaacagccgaatctcgtatggcgtcgctctcttttgaggcagtggaatcacattatggtcttataggcgtgactccctcagatgttccactcggacgggttgtagaagtcgccgttgagggccttggcggccttctcctgcgcttcctcaagcgtgacgccggcgagttcggcacgcacgtcgtcgagcgcgaccggggtcatcgacagggagttgacgccgatgccggtgagcacgacggccagatccggatcggcggcggcctcgccgcacacacccaccggcatgccgttcgcgttgcccgcgtcggcgatcagcttgatcgcgcgcaacaccgccgggtgccatgcggtctggtagttggcgaccgagccgagcgtacggtcggcggccagcgtgtactgggtcaggtcgttcgtgccgatcgacacgaagtcggcgaccttggccacctgatcggccatgagggcgatggacggcacctcggccatcacaccgaccttcttcaggccgaaggacttgccgagcttgacgaagtaggcggcctcatgcgcgtcggcgaccatcggcgccatgacccacaggtcggcgtcggtctgggcatcggcggcggcaagcgccttgagctgtccctcaagcacgttcatgtgggtgcgcagcgtgcgcaggccacgcaggccaagcgcggggttcggctcgtcttcgggggtgaggaacggcagcggcttgtccgcgccggcgtccagcatgcggatgacgaccttcttgccggggaactgggcgagcagttcggcgtacgccttggtctgctcctcaacactcggcggttcggcgttgccgatgaacaggaactcggaacggaacaggccgacgccttccgcaccgtactccagcgcggtcttgccgtcggagggcttgccgacgttggcgagcagcgggatgtgataaccgtccttggtggcgcccggcttgccgcgcagctccttggccttcgcggccttggccttcgcggcttcggcggcggcgacctgctcgtcgctcggctcggtggtgatggtgctttccgcggcattgacgataaccgtctcgccgttcttcaggtcgtcggcgccggcggcggacacgacggccacgatgccgcgggcacgggccagaatggccgtgtgcgaggtcgggccgccctgcgaggtgacgatggcgagggtcttgtccaggtcgaggccggcggtgtcggccggggacaggtcttccgcgaccagaacgaacggggtgtcggagaccgggacgcccggcgcgggaacgcccatcaggtcggcgatgacgcgctggccgacgtcgtgcagatccgccgcacgctcgccctgatagccgccgatggccttgaacatctcttccacggcgccgaagccttccagcacggcgcgctcagcggtcttgccctgctcgatgagcgtgttgatgctctgcgcgagcgccgggtcggaggcgaacatggcgatggcctgcaggatcggagcagcctgcttggcgccttcgtcgccgttcgcggcctcttcggcacggcggttcagatccgcgttgaccagcgccagagacttggtcacgcgctcgatctcggattcggccgagacactgtcggcgcgaggcgcatcggacggttcgggaagcgcagctgccatacgaatgaccgggccgaccgcaacgccgcgtccgatgccaacacccttgataaccatatgttctccttatgttatggcctctcgccgcgaatgaccggtacttcccatccgcggaccgccttgttgacccaccaacttcatcgccggtaaatcattttctgtccacgccagtatacaccctcaaaagcgcgacacgactagaagtaaacgttttccagaaaattggaaaatcatggtacactgttatgtcagcagccagaagaacggccgcccagcaattggcatagagtaatgttattgctaatcggtatcggcgcgggccaacacggcacacgcacgctgacgagtgtcgatatcgacgcacgacaaaccgcaccggaaccaccggcgcgacgacgcaaaggagtgtctccatggttacccgcactaccaccatcaccgatcccgtcggcattcacgcccgtccggccgccaagttcgctcaggccgcgaccgcgtccggctgcaccgtgaccatcgccaagcagggcggcaaccccgttcccgccggttccatcctgtccatcatgggcctgggcatcaagcagggcgacaccgtcgaggtcaccgtggacggcgacaacgccgagaccgtcatcgacagcctcatcgagacgctcaccgcggccgagtaacctgcgcacgcattcgacggccgcccgcacgaaccgcgtgggcggccgtcagcgtattcccatccaccagatgcgcaccgacgcgcatcgcaagcatatggcggccgcccgccgtcataccgaacactgcgagccccatgaagagacagccatccgccgtaatggacgccataccggcatccaagccagacacgacgcccgtcaacgacgacccggcgcccggcccggaacaacgcccacagccggcgaccagttccatcaccaacgtggccgccatggcccacgtctccatcgccacggtctcccgtgtgctctccggcaaacgcaccaaggacgacgacatcgcacggcgggtccgggccgccgccgaggaactcaactattcggtcaactatgcggcgagttcgctgcgcggcgccgccaccaacaccatcggactggtcatcccttcggcgaccgaccatttcagcgccggactgcttgatgagctggaaccggtcatcgacatggaaagacagcaactgctgctcggcatcggcaacgagcagcatacgcaggacgaacgcatcgaatcgctggtggcccgcaaggtcgacggcatcatcatcgttcctgccgcgggcgtcgatctggcccacacgcttgaccgcaccaccatgacgacgcccatcgtacaggtcggcggacggcagcgatccttccgcacgtccatggtcggcatcgacgagaatgcggcgatggaaagcatcgtcgcgcacctcgccgagcagggcgtgcgttccgccgcctatctggccggcaaggaggtatcgttcgaatcggccgagatgttcgcgatgttccatacgcagatgcgcacgcaccggctcgtcaccgacacctcatggaaccgattcggcgattcgaccgtggagcgcggttatcagtgcgtgtggcgcatgttcgccgactccgatgcgcgaccgcccgaagcggtgatatgcgccgatgacatgatcgcgctgggcgcgatgatcgccttgcagacgctgggcatccgcgtgcccgacgacgtgcgcgtggtcggctacgacgactccccgcttgccttgacgacgatgccgacgctgacctcggtccgcccgccgttcctccagatcgtcaccgaggcgcgccgcctgatcgggcaggggcccgatcaggcggcgcacatctcgctgctgccccaattgattgtccggggctccaccgtcgtgcgttcctgaccaggtgccgtcatagcctccccggaatcagcgcgcagaacagcgcctcgaacaccagcatcgggttgccgttgcccagcaaccgcttcctggccacggcgatggcctccaaccgatcgaccacttcctgacggctcagccgtgccgacagctcggcgatggccgtgcggttctccatgttgatcagcccgactgcgtcctcggcgttgttctgcagcaccgctatgtcgcggtagatgctggcggccgagttgagcgcgcggtcaagcacgtcgcggctccggcgcgtggtctgccgcttgatctcgtccttcttggcgatggcgttgtaggcgccgcgcagcttcggcgggatgcggtcctgctcgccgaggccgttgatgcggcggaaatccgcttcggcggcggccgcctgccggttcacgtcggcttccgcctggcttttggcggtgtcgatgagatcatcggccagcagcaccgcatccgatgccttgcgcagtcccagcagcccgacgatgagctcgtcccggtccgacatgacctgcgtgtcggaggcgtacagtttcgctatgccgatatgcccttcggcgagccgcgccgcgcgcaccgccacatgccggtcgaattggcgttccgccggcagcgccggattgatggatgccatcaggtaatccgcgaccgctttcgtggacggcacggcaaggttgacgatgcgggtacgcgagcggatggtcggcagcacatcctgcgcgctgggggcgcacagcagccatatggtgtgcgggctgggctcctcgatctccttgagcagcacgttcgtggtgcgttccagcatgcggtcaacgtcttcgatgatgatgatccgccacggcgccgtgctgggcatctgttcggaggtgaggatcagctggcgcacgtcatcgatgccgatggtgaccttgttggtggccaacgtggtcacgtcgggatgggtgccggacagcacctgacgggttatattggtcggctcgtcggaaaggcccctgtcagggctttccagcgcggccgcgaacgcgcgcgcaacattcgagcggccggaaccgggcggtccgcagatcagccacgactgggccagcgccttcgggtcgccggagacgatggcctgcatttggccgaccactgcctgctggccgacaatggagtcccatacgctcatcgcgcacctccagccggagtgttaccgtcgctttccttagtgacggcagcctgagcggcagccgcctgcgccgcggcccgctcatccgccgcggcatcggccagcaccgcgtcaacgtccgccttgatgtgctcccatacggcctcgatcggccatgcggcgtcaatcacgcggaaacggcccggctcgtggcctgccagatcgaggaacgcctgcctggtgcgctgctggaattcgtcgcctgcggactccatgcgatccgcgtcatgctgcagacgccggtgcgccgccgtcgggtccatgtcgagcaggtacgtgcgcacgggcatcagcccgccggtcgcccacatgctcagcccgcggacgtcgccggcggtcagttcacggcctcccgcctgataggcgagcgacgaatcaagataccggtcggtgattaccacggctccacgttccagcgccggacggaccacttcagccacgtgctgcgcccggtcggcggcgaagatcagcgcctccgtgcgcggtgcgatatcggtgccgtcggcttccgcggcgtctcccggctcacgcagcagcagctgacgcaagctgccgcccaatgccgtgccgcccggctcacgcgtcaccacgacctcgcggcctgcagcctccaagtagtcacgcaggcgctcgacctgcgtggtcttccctacgccgtcaacgccttcgaaagaaatgaacaatccagtcatatctacccccttgcccacagtgtacgcgatggcggcatgcgacgcggccaggccgccatcgcggcggctgcgacgcgactctactcggcggtcttcttcgctgcggtcttcctggccgtggtcttcttggcggccgtcttcttcgcggcggccgtcttcttggtggcagatgccgtggagctcttcttcgcggcggtcttcttcgcggcggcgcccgtcgtcttgcggcgcccgcgcttggacgggccggcagcacgcttctcggccagcaggcggaacgcctcggccggctcgatggactcggccgtgtactgcttgggcacggtccggttcgtttcgccgtcggtgatgtaggcgccgtagaagccatccttgatggtcacgttcttgccggtttcgggatcggggccgagctcgcgcagcggcggcttcgcggtgccgcgtccacggccgcgtccgtatttcggctgggcgaacagttccttcgccttgtcgacgtccacggtgaagatctcatcctccgaggcgagagaccgcgtctcggacttgccgtcggctccggtcttggtcaggtaggggccgtaccggccgttgttcgcctcgaccgtgacctcgccaagttcgccggtctcggtgttggcctcctcgtaaatgcccacggtgcgcggcagcgacaacagtttcagcgcatcgtccagcgtgatcgattcggggctcatcgtcttgaacagggacgccatcttgggcttgggcacagtggtcttcttggacttcgtctcggatgacccaccgtccgtctcgagcggcactaaggccacatacgggccgaaccggccgttgcgcacctcgaccgtgccgccgcttgccgggtcgacgcccagctcgcgcgggccaccggcattgctgtcgatgagctcatggccgacctgcacggtcagctcgtcgggcgccatggtgtcgggcagggaggcccgcttggggttgcccgccgcatccacgtggttcatgtcttcgagatacgggccgtaccgaccgacgcgcacgtgcagtccgtcgccgatgtcgatggtgttgatggcgcgggcgtcgatctcccccagctgcgcgacctgctgctgcaggcccgcgtgcgcttcgtccgccgaagtcgccgcgtcgccgccggaaccgaaatagaaatgggtcagccagtcacggccggtctcctgaccgtgcgcgatctggtcgagcccgttctccatatccgcggtgaactggtaatcgacgtacttggggaatttcgtctccagcagcttgatgaccgagaacgccagccacgatggaatcagggcgcgaccgcgctcgtagacgtatccacggtcgatgatggtggagatgatgctcgcataggttgaaggacggccgatttccttggcctccagcgtcttcaccagcgacgcttcggtgtatcgcgccggcggctgggtctcgtgcccgtcagcctccaccgaggacgcggcgagacggtcaccggtctgcatcggcggcagcgatccgttgtcgtcggtttcgcgcgaggcgcgtttcgccgcggcctcgccgtcaccggcacccatcgaggaggcagcgggggccgccgcacgacggccctccccggtggccttcatgaatccggggaactcgatcaccgtgccggacgcctggaacatcgcctcgccgtcctcgccggcaggagccgacagacgcacggtcgcggtggagccggtggcgtcggccatctgggaagcgagcgtgcgctgccagatcagcgtgtacagtttcagctggtcggcgggcaccttgccggagagctccgccgggtcatggaaccgcgcgccggcgggtcggatgcattcgtgagcctcctgcgcactagcggtcttcgtcacatactgcttggggccatcggacaggaacgactttccgaaatgatattcgacggcatcacgggcggcggcgatggcctcctgcgacaaggtcaccgaatcggttcgcatatacgtgatgtaaccgttctcgtacagcccctgcgcggcacgcatggtctgacgcgagctcatggacaggcggttgccggccgtctgctgcagcgtggatgtggtgaacggcgggagcgggcggcgacggtacggcttggtctccatcgatgccacggtgaaggtcgcgtcggccaggagcttggcgagggcgttcgcatgggcctcatccagctggcatacgttgtcagcgaaaccggacggcgtgagcttgccgtcatccgaaaaatccttggaacccgcaagtcgcttgcctccaagcgacaccatgcgcgattcgaacgacgccggctcgccctccgcgtccgtcgcgcccagcaccgcggtcacgtcccagtaggaggcgcgcacgaacgccatgcgctcgcgctcacgctcgacgatcaggcgtgtggcgacggactggacgcggccggccgacaatcccgggcccaccttgcgccacagcacgggcgacagctcgtagccatagaggcggtcgaggatgcggcgggtctcctgcgcgtccaccatgtcctcgtccacgttgcgggtgttgcccagcgacgtcttgatggcgtccttggtgatctcgtggaacaccatgcgcttgacgggaaccttcggcttgagcgtctgcaccaggtgccaggcgatcgcctccccttcgcgatcctcatcagtggcgaggtagagctcgtcggagttcttcagcgcttttttcagttcggcgacggtcttcttcttgtcaccgtcgacgatgtagtacggtttgaagccatcgtcgacgtccacgccgaacttgccgaacctggccttgtcgtccgcgggaatctgactgggctgtgcaaggtcacggatgtgaccgaccgatgccatgacggtgtagccgctgccaagatacccaccgattttcttcgctttggtgggagactccacgatgacaagcttgttgccggtgcccattgtctctccttacctacaatgtcattggccttcatcatactcacgcggcatggtcaaacggcaaatcgcgcggctccgcggcggtcaccgcttcttcttcggcggggccggcggcgcccccaccaggccggctcggctcaacggggacgccgtgatctgacgcatcgccagcagcatcccgaacaccagcgacgaaacgccggctatcatcgcgaaggtggagacgtgggcgccgacgctcgcccagctcgcgctcaggctcagaccgggctcaatctgccacatgatgtatgcggcatagcagcagcacagcacacccgccgtgatcatcaccgtgccgacgatctgcacgctcggcgaggacgcgcgtttgccgggcgcgtccatgccggacgtgcgcgtgaatgccatcgccagcagcgcgaagccgcccgccagcagcaggctcatcaccacgtcgaccgggcggtgccatgcccccgcgatcaccgacaggccgatgaccagcgcataggcggccccgaccagcgccatccacgcacggcatccgcgcggaaccgcgaacagcagcagcacgcccgcgacgacggccagcatcgtatgaccggaaggcgcggaattggcgggctgagacacggtgttgatgatgaacggccgcggcagcacacctttaagatatgtggacgcgaaacacagcgcggcgaacaccgcggactgcccgaccagccaccaacgcttgcgtaccagcatcaccaccgccgcgacaacgatcagcagcgcggagacgattacggtgaagttcaacggatgcccggcgattgacgtgatattgcggctgatgaacggggcgaccagagcggacgcccacgacggcaggctgtcgtggaagccgctgaacaccatatcctcgtatgattgcccgtcctcggtgcgcacggcgatccaccatgcgccgaacgagatcgcgatcatcagcacgccgaacaccgcacacagcacacggctcgacacgcgcggacgcacggtcagcgggtcgcgacgcgccaatccgcgctcgatggccacctcgtcgtcaatgtccgccgcgtgttcgtcgggcgcggcggccttacgtttgcgcgcggccggcgcgggcgatccgagggcgcgcagcggatgatccgcgatcgtctccaaagcggaccatgcgctggccggggacgcctgcggcaccacgggttctggctcctgtttcaccgacgagcgcgcctgttctggtgcggggtctgatgccgacgcgccagatgacgtcgtatccgatgcggctgcggtatccggctcattcggcgtgtcagcgggcgcatcggtcgtctccgtggacggcaggcgttccgccgacgttgccgcatcagcccggtcgccgctgacctgcacggcgtcaggcggaatcgcaccgtcacgcgagatttcggcgggatcatcaacacgctgttcttcactcatacttcaagactgtagagcctgtacatgtgtcagtcgcctcatcgcgcccatattccgacagaataatcgaaaacctggccccggcatatcaaaatacgggttgaaatcgccgaaatctactattccccgtgtgaaatcgccgtttcaaggtccaaaaacggcgatttcgcacggggaattgccaagaacggcgatttcaacctgtaatttaagcctcacggtgccgcgacggtcagggtgaggggccaagaaaagaaaaagaaaaccttcacgtacccgacagaggccacttacccttgctgcattcctgccctggggggattgggtgacataacgccacgtgaaggctgtactagtatacatcacccccggatatcgggtgcgcaacgacaataatgcccctccccgcgctcgcgggaaagggcattatcggctatgggagactagcgacgcaccgcgtcacgccggcgaatgatcaccagcgtggccccggcggcgagcagcagcatgactacgcccgagatgccagtgacagcggcacccgtcttggcgacgccggcattgctgccgttctggccactgttggcgcccgacgcaccgggcttcgccggggcgccaggctggctcggcttgccgggcttcgtcggcgtgccggccttcttcaccaaagcctcttcggccttgaacagagcgccggtcgcgttgttgatctcttcctgagtcgcgttgtcgttggcgagcaccgccttggcggcatcaagcgccttgacgaacgcagcccacgaatccgccgtgtagtcggattccttcagcttggccgcagcatccaccgccgccttcagcttgtccttagacggcttggcggtcgcgttgacgagcccgttgatggcggttcgcaacgccgtgtaggcgtcgttgacctgctgctgcgtggccgtgtcggagtcgagcaccttcttcgccgcgtcgaaggccttcttgaatgcggcccacgaatccgccgtgtagttggattcctggtacttgctagcggcaaagaccagagtctccagcagcgccttgtcgatgttcttcacggtgtgcgcgtcgatgacgggctcatcggtctcgatgttcgggaagaagccgttcttgtgcagcgccagcaccttcggagcggtctcggacgaatcatccgcggtgtggacggcgaccttcgtgccgttctcgtcggggaagctgaccgtgccgttgccttcggtggcggagtcgccgaaccacagggcagggtggtacgcgtcgaacgagtcgtccttggaaccgcccgcagtgtcgacgatgtactgatccttcgcgccggcagcgtaaatcgactcgatctgtgccatgtaggcgatcggggcgaccttggtgtctttggtgaatccaagggcggacagcttcacggagagcacgacctggttggagtcggagacatatgcggggtcgatgggctcctcgtcaacgaccttgccggttgtcgcggaagtcgtcgtggcccatgcggtgtcgtactgcgtgttgccttcggtggtgctcaccgagatcatgtagtcggccttcatgtcgccgtccacgtcgaagatcacgtccggaacgaaattgttgcccaggtgggaccacgtcttgtcggtgatgatgccgaagctcagcaggccctgcgacggatcggagagctgaggtgcggtgctggaataaccgatcgcgcggatgtcacctgcggcaaggctgcgagcggcgtcaccgttgccggtgtagccgtcgaccggatcctcggcaccgtacacgaacgggacaagctcggagtggtagccggtggcggtgtcgccctggtcaaggccatggccggacacggacagcgtgcccttcttgttgttgaagccgctcagtcccgtggtggtttcggagattgccttcggcaccgaagtgacgggcacacgcagcgtggtggcgtcatcctcctgggtgaccggagtcgcggtgatgatgccgctggcgtcggtcacgtactggcggtccttgcctgcgacctgcgcggactgcgtggcgtcgcgggtgcgggtcagcttggactggtcgatgctgatcttcacgcggaagctggtgctggtcccggacttggcgaccacggtgtccccaccgttgtcgccgctcaccgagtacgtgacgcccggcaccggggtgcgggccgagtatgtgagcttgtacgtaatgtcatgatcggtgttgttcacgagccgcatggtctgcttgtcggtgtagccgtccttgccgaccgggatgacgccgaactgcgcggtgatggcctcgttatcctctccggcaagctgcacgttgttgttcactgcggcgagcgcgtcgatacgaccggagcccacacgcagcgggccgtacgcggtcttgcgatccgcggtgagcacgtcgtggttggcggtgttcatcagctgggccttgaccacgttggccaggtattcgggccgggcctgacggaccagcgcggcgacgccggaggtcaacggggtggccatggacgtaccgctcatgatctcgtcgctgttgccggtgccggccgaagcggacacgatgcccacgccgggagcggagacatcgggcttggcggtgccgtcataggagccgtggatgccacgggaggtgaaggacgcgatggtgtcttcgctctcgctggagtagtcggcgtccttgctcatacgcagcttggtggacagggtcaccgtcagcgtgccgtcatcgatggcgctctgcaggtccttgttctcggcggcgttcttgaccagctggaagccggggatgtcggcgttgccgccgatgccggactcggggatgttcgcctgcgagccgaacaggatgccggtcgcgccggccttctcggcgttgtcgaagcgggtcttggagccgcagttcacagcggcgtcgttccattcgacgtaggcgatgttgcccttgacggcagcggcgtcatcggcggagtatgccttgcagccttccaggttgtccttgtccttgacacgcacgaccttgccggtcagggagaagtcgtcgagcttcgcgtagttcacggagtactggccggcgagggtctggcccttgagcgaggccgggccgtcggtcacttcgacggcgtcctgcagcgccttgccggactggctcgcggccacggtcagcgcgctcttggcggtgccgggggcacccatgatgtcggtgatgtcgccgtcgttgccggccgcgatcacggacagcacgttgtctgcggtgaggttatccacggccacgttctccgggtcgtcggaggcgccgaagctgccgccgagcgacatggagacgatgctgatgcggctggactcgtcgccgttggcttccgcctcggtgttgtgcttggcgatgccgtcaagcgcttcgagcaccaggtcggtggtgccgccgttgtcgccgaacaccttgtacgagtagatgccggcctcgggagcggcgccggggccaatcttccagctggcgatgtcgccggcggtcagcttctggtagcctgcggtatcggtcttgcccgaggtgccgtcggccttgacgccgtagcccagcgcggtgccggcgacgtgcgtgccgtggtggccgccctggccgtcgatcgggttggcgtccggggtgggattgttgttgccggcgttcgggttatacgtggcgccggcgtaatcgtaaccgcccttgaacttcgtcttgtcgagcagcttgctgaccttcgggtcggtcagcgggtcggcggtggagttcagcgcggtctggtaggcctcggtggtgcctgcgccgccgaagtcggcgtgcgtgtagtcgaggccggtgtcgacgactgcgatgttcacgcccttgccggtcttgccggtctgttcccaagtcttgacggcgttgaccagctggtcgttgttcttgttcgcgggggcttcgccactgccgttggtcgtgtcgagcgccttcttgggcgtcaggatcgtgatgtgcgccaccgagccggactgctcggcgagcttgcgcagcgacgccgcgtcggcgcgaacggctacgccggacagcgcatacgaggtggagtagatcttcttggcgctggagtccagcgactgcagctgcgagaacacgttcaccgaggtcttctcggcggtcttcgcgctctgcgtggccgcctgggccgactgcgcgcgctgcttcagcgtgggcagcgcggaacgctgcctgctgaagttcttgagcacactgttcttgcgttccagcgcggaggggctggtggtctggatgaatgcggtgacctcgcccttcgcctgctgaagctgggatgagaccttgctcttcaggttgccggtcgacagagtcggcgtcgtggacgccgcgtcaccttgtgccggagccgcgagcgcggtaccgggcaggctgcccgccatcgccagggccgctacagcggcaacccagcgaggccattgcttattggccattattgttttcctctctttgcgtgcgtcactcacgacgacactgtgaaagaaactagacctggcgctcgtccgatatcgttacgttttgtcgcatcgcgtaacatttcaggaacatattgttaacactcacctcacaatgccatatacgccgactctcacgtcccgcgcatgacgcacgccatcgtcagacaggcagacctccatcagaccgcgcttttcagcccctcccatgcggccacagcgtattcgaccggcatccattacggcagtcgagcacgtacttccggatcccgacgcatccacgatccgcttatgcccggctataagaaaaaactatgaaaatcttcagctgacggtcaatatatgatacacacgaaccgccatgctgccttcggcggcccggatggcattcgattcaccaccagagaagcattgtcagcgaaccatcagcgacctacactaagttacggtagcgtaagttagtgtaggccgggcattccggccgcagcgaggtgatgatgatgagcgcgtcaatcagtgcaccatccatacgcaagtccgcggcgcagcgaaaaacagcgcggcgacaggccgcgggcggcgggatgcgggcggccgccacagcgcagaccgcaaccactgccggcatggccgcgacgcagaccggtgcctcggccaccgcgatgaaccgcgccctcgagcagtatcgcgccgcgcgcgcacgctatcgccaagccaaggccacactgaaagccgccgaacgccaggtcacgccggtcgatgcattcggcaaccgcaagcctcgactgcgcggatggcagcacctcatcaccctgccgttgtgcatcgccgcatccatcgtgctgatctgcatcgcgccggccggaccggtcaaggccgcatgcgcgatttacggcgcgtcggcgatactgctgttcggcaacagcgccctgctgcacgtcgtaccgtggcgcagcgccaaggtgacgcgcgtgctgtgcggcatcgactactccaacatcttcctgatcatcgccggcaccaatacgccggtgctgttcgcgctcagccctccgatccgatggccgtacctgacggtgatatgggcggcggcgctcgtcggcacggtgatgcatatcgtatggctgcgagcgccgaactgggtgttcaccgtcgtgtacgtggtgctggggctggcgccggtcacactgcttccggcgctgtggaccgcgcccgcggtgggtccggcggcgaccgtgctgattgcgtgcggcggggccgcctacattgcgggcgccacatgcttcgcgatccgcaaacccaatccgattccgggctggttcgagtttcacgaggtgtttcacatgggcacggtcatcgggtacacctgccacgtggtggccatatatctggtcgtgtgcgcgctgtaaaagacgccggacatgccgtcaccgaacgttcatcaaatcgttcacagggatggttgcgcggtcgataatgtgcggtatccttggtcgagctgagaacgaaacgcacatgacggccgttcatattcgacgcggggaacagcgcgaatcatcaaatggaaaggtcgcggcgcaaccggcaccgccggcgcgggccgcaacggaaggaagctatgaacgcggatttggtgatcgtcggcgcgggcctgttcggcctgaccatcgcacagcaggcggcggagcgcgcgggcgcccgggtcgagatcatcgatgtgcgcagccacatcggcggcaacgtgtacagctatatcgacgaggagaccggtgccgaaatccaccaatacggtgcccatctgttccatacttccaccaaacgcgtctgggattacgtcaaccgcttcaccgcattcaccgactacgtgcatcgcgtgtacgccacgcacgacggcgaggtctacccgctgccaatcaatctcggcaccatcaaccagttcttccgggcggtctacacgcccgccgaggcgaggcaactcatcgccgagcaggccggcgaactggccggcaccgacccgacaaacctcaacgacaagggcatccagctgatcggacggccgctgtatgaggcgttcatcaagaactacaccgccaagcaatggcagaccgatccggccgaactgccagcgagcatcatcaagcggctgcccgtgcggttcaactacgacaaccgctacttcaaagacacatgggagggactgccgcgcgacggctacaccgcgtggatggagcgcatgatcgacgacccgcgcatccatgtgacgctcggcaccgacttcttcgacgagagccagccgctcaacaagaaggcgctgcgcgccgccggcacgcccgtggtctacaccgggccgattgaccggtatttcggctatgaactcggcgacctgaaatggcgcacggtggacttcaaggaagtgcgctacgacgaggacgaccacttcggctgcccggtgatgaacttctccgacgcggacgtgccctacacccgcgccatcgagttcaagaacttcaacccggagaggcgtgacgcacagaaccacaacaggacagtggtgtgggaggaatactcccgcttcgccgagcgcggcgacgaaccgtactacccgatcaacacggacgccgacaaggcgctctatgagcggtacgcagccagggcagccgccgagccgaacgtcgtgttcggcgggcgcctgggcacctacaagtactacgacatgcacaacgtgatcgacgccgccctcaccgcatatgaggagcaggtcgcgccgatgctgcgcgcccggtgacaccgactggcgggcacttccgccgccgcctcttctcatttcatccggatctcccgcccatcccatccggccacagtctcatacgctcaccggaaagtggggctatgaccggatgaggcaacgccgcaccgctttggccgggcccaaaccagcgaagcattcatacaatcccacaatgcagaatccgactcacattaaggacggtcatgaccgtcaccgtgcgagggtatcgtcactgtgtgagccctcgcacagtgacgcatccggctaaaacccttattttccaacgtttctcacgataccgtcacgccgagaggctatggttgtggttttgctagatatagacaagcaccaagcacgatatcgacgtttgtaaggattcagaggaaaaccggtgaggaaagcgcgaaaatatgcgcaaaccggttcgcatcatattgcaaggactacggtagaatcatggcttcacatacgcgcactgttaattccagttcaggccgacgcgcggcaggaacgtccggccgtcgggcggccggcgcctcaggccgcaccgcgaccggcacccaagcgggtgcagcgacgggcacgagaaccggcggcaccgccgcaaccaacggttacagcgcgcagcgcaacagcggctcaaggcgtggccgcggcgctaatccgcccgaaggcacacaccgcggcggcggcacccaccgctcccccggctcgaaaggcccgaaagccaaagggcgcaagaagcatctgattctcaagtggacgctcggcatcatcggcctgttcctcgccgtcggcatcggcgcgttcgcctacctgtacgccaccatcgaaatcccccagccggagaccatcgcgctggccgagaaaaccagcgtgtactatgcggacggcaaaacgaaaatcggcacgttcgccgagcagaaccgtgagatcatcgactgctccgtactgccgaaatacgtgggccaggccgtggtcgcctccgaaaaccgcacgttctacacggaccgcggcatcgacctcaagggcatcgcacgggcgctgatcaacaacgtcaccaagggcacccgccagggcggatccaccatcacccagcagtacgcggaacggtattacctcggcgagaccaccacctacatgggcaagctcaaggaagccatactggcggtcaagatcgcgcagacgcaagacaaagacaccgtcctgtgcaactatctcaacaccatctatctcggccgcagcgcctacggcatccaggccgccgcccaggcgtacttcggcaaggacgcgaaagacctgactgtgcccgaggcggcgatgctcgccggcatcatcccgtcccccagcaactgggatccggccgtcaacgccaagcaggcgaaatcgcgattcgagcgcgtcatcaacatcatgaaagaggacggctacatcaccgccaaacaggccagtgaagccacgatgccgaaaaccgtcaccaacgcacagcagaacatctacgagggccccaacgggtatctgctgcagatggtccgcagcgaactcatcaactcaaaggcgttcacgcaagacgacctcgacaccggcggctacaccatcgtcaccaccatcgacaaatccaaacaggatctgatgtatcagaccgcgagccccaccaagggcaacgcgggcatgccggacggcgtacagaccggcggcctgtcggtcaacgtcaaagacggttcaatcatctcgctgtacgcgggtgaggattacctgaagaaacagctcaacaacgtcaccgacgcgacctacgaagtcggttccacgatgaaaccgttcacgctgctttcgaccgtccagacgggcgtcagcctcgatactgtgttcaacggcaactcgccgcgcagcttccccgggctgaaacagccgatgtcgaactcgggcggcgctagctacggctacatcaacctgtacaaggcgacggcgaactccgtcaacacggtgtacatggatctgcagcagcatctcggcgcggacacgataatcaagaccgcgcacacggccggcatcaaaggcaagatcaccgatgacggctacgtgacgctcggcaactccggtctgagcatgatcgacatggcgcgcggcttctccaccatcgccaaccagggcaagaagccgacgctgcacatcgtcgccagcgtgaagagcagcaaggggtcggaactgtacaaggcgccatccaccgcggagcaggtgttcgacgcgaacgacaccggactggtggtcaaggcgatggaaggcaccatccaatacggtaccggtcgtgcggcgagcgcgatcggcaagacgatggcgggcaagtccggcacggcaaacgacaacaaggccgtgagcttcatcgggttcacaccctcgacgctcaccatgttcgccatctggaatcccggagcgaacggcgaggcgctggaactgccgaccatcaacgggtattacaagggcatgggatatccggccgtgctgttcaccaactacatgtcgagggcgctggagaacgtggcggacgagaagttccccgacgtgaccgacagcggcaagatcggtggacccgacggcacgtggggcaccggttcgcagtactcgtcttggggcaacagcggccagtcgcagagcgggaattcgcagggcggcagcaagagcgacgaccagtcgtcacagagcggcacgcagtctggcgacgggtcgggctcgcagtcgacgaagccgcagaccggcaacggttcgaatggcagcggcaatggatcgggcggcaacgggtccgatggcaatggcgggaacggcggcaacaacgggaataacggcaacggagggaacaacggcaacaatggcggaggctcggattgcgcgaccgatcccaccgccgccggctgctccaccggcaatgaatccaacaccaacggcatagcgtcgcagtgagggacgaggccggattcgcggttattggcgtgcgttgaccatccccgccggcgggggcacgagggccaggccccgtgcgactggaggtggttccggcctctcacgaccatcaaaaaagggtggctgcagttcaaatcctgcagccactctttcgtttaccgcgaaatatcagcgctgcgaacggttgatcgcggagatgatcgccttgagcgcgctggtggtaatcgaggagtcgatgccgacgccccagatgatctgggtctcagcgtcctcacccacctggcattccacgtaggacgcggccatggcgtcggtaccgacggacatggtgtgctccacgtaatccatcacggacgcctcaatgccgaggttggaaaccgcgttgaggaacgccgcaatcgggccgttgccgatgccggagatctcacgctcgtgaggttcgtccacgcccacattcacgccgcggtcgagcacacgcgccttgagcacggtgtctgaaccatcctcgccggaactgacggccaccttgagcagtttgaggcggccccacggagcgagcgtcgcgtcatgcgtatcgccgacgaccacgccggcggccgtcatgccggactgctccaccggcaggtactcgtccttgaagagacgccagatgtcctcgtccttgacttccttcttggtcgtgtcggcgaagttttgcacgatcttgtcgaactccacctgcagacgcttcggcaggtcgaggttgtggttggtcttgagcaggtaagccatgccgcccttgccggactgcgagttgacgcggatgatcgcctcgtaggtgcggccgatgtccttcgggtcgatcggcaggtacggcacgagccacacgaacttgtcgagatcggcgccgactcggtccgcagcgacctcgcgggcttcgaggcccttcttgatggcgtcctgatgggagccggagaacgcggtgaacacgaagttgcccgcgtacggatgacgctcggagatcttgatctggttgcagtactcgacggtcttgcggatctcgggaacgttcgaatagtcgatctgcggatcgatgccctgcgtgagcatgttcagacccagcgtgaccagatccacgttgccggtgcgctcgccgttgcccagcaggcagccctccacgcggtcagcgccggccagcacggccagctcggtggcggccacgcccatgccttcgtcgttgtgcgggtgcagggagagcaccacggcgtcacggtcgtcaagatgcgtggacacgtactccacctcatcggcgaacacgttcggcgtggtcatctcgaccgtggccggcaggttgatgatcatcgggtgctcgggggtcggcttgatgacgccgatgaccgcattgcacacctcgaccgcgtattccggctcggtaccggtgaacgattcggggctgtactcgtaatacaggtcgatgcccttggcctcgttttcaaggtccttgcacagctcggccgcgtcggtggcgagcttcttgatctcttccttgttcttgcggaacacgacctcgcgctgcagcacagagaccgagttgtagaagtgcacaatcgcacgcttggcgcccttgagcgcctcgtaagtgcggcgaatcaggtgctcacgacactgggtgagcacgacgatggtcacgtcgtcggggatgagctcgcgttcaataagcatgcggatgaagtcgaaatccgtctccgaggcggacgggaagcccacttcgatttccttgaatcccatggagacgagcaggttccagaagcgcagcttgcgctcggagtccatcgggttgacgagcgcctggttgccgtcgcgaaggtcgacggaacaccagcgcggggcacgctgcagacgcttgcccggccacgtgcgctcgggatagtcgaacggcacctgcttgtcgtaggcgacgtacttggtgtaaggcatatcgctcggcttctgcggctcgccgatgaatcgtgcgggaggcagcagcgggtcgttgttccccccattggacgccgcggcgaccgccgcaagatcaaacactgatgattgatcctgacccatatctcctcctttacttgatgatgccggcgcctgttgcctgccggccgtatgttgtcgtcgcacgataggtcatgcaattaatcagtctagcgtgaagcgccccggtaaaccgccgagatatcaagaatgcggccaatccatgcggccttcggagcgttatctcgcttccgagggggtgatttcagacccgccgaacatctatctgcgtttcaaggggttggcgttgctcgatattcgaggtattgcatgatggacgccactggaatcatgcggctcccatgccattgatactcggccaccaacccctcgaaatgcagatagatgttccggagcgtccgagtcaccccctcgaaacgtagataccctgccgagataacgtttcggcccctctccggacgcccgttgactgcatggcgacgcccgctccacgcgtggtggcgacttcgcgaagagtatggcgccgcacagggcgactcgctacagtggagggcatgacactgcgttttcacgacgacggcacgttccgcgtgctgcaaatggccgacattcaggacggcccggaagtcaaccgcgacacgatccgcatgatcgaggccgcaatcaacgaggcgaggccggatttggtggtgttcaccggcgatcaaatccgcgggtacgatcccgcgtacatcgacacgttcctgcgccggcgcggcgagaaccccggcgcacgcgtacgtctcgtcaccgaaatcgaggcgaagctacacggcatccacaggcgcatcgcggcgcggcgcgatccggacctgccaccgcaggacgatgtggtcacgatggacgacctgatgaacgacacccggcagaaagtgcgcgacacgttcagcgcgttcctcggaccggtcatcaacgcgggtgtgccgttcgccgcgacctatggcaatcacgacttccagtgcggcatcctgcctgacgagcaggacgacatctaccgcgagttccccggctgcctgaatcccgaggccgatgtggccggcggctcgccgttggccatcgagccgggcacattcgcgctgcccgtgctgtcctccgacggttcggagcatgtggcgatgggcgtgatgctggtcaattccggcgattatgcgggcaatccggaggagaatgacgcccagtacccgcggtatgtggcgcattcgcgcggactcgacctagcggattcggacggctacggcacaccgagcgctgaggcgatcgcatggctgggcgacgtgcagcgcacgctcgccgagcgcaacggcgatggcgaaccggtgccgtcgatcacgttccagcatattccgccgcaggaattctatgactgcctgaccgaggtcccggcatggacgccgaacgccgtggagggcgcccgcaattacgccgggcgctgctacgtgctcaacgacgccgtatgccggccggggtcacggctcggcgaggcgatcggctgcgctgacgagaacgtcggcgaggtggacgcattgcgcgaggcgggcggctatttcgcgttgtactgcgggcacgatcacaagaactcgttcgtcgggcacgtgcatgacctcgatctagggtatgcgccgacgtgcggcttcgaatgctacggtccgaagtctcgcctgcgcggcatccgcctgttcgagttccgcgaggacgacccggccgcgtatgagacccgcatgctcacgtggggcgacctggtcggccgttacagcggcaatgagttgcgcgtgttcttcgaggatcattgcgtgacgggcgccgcgaccctgcgcaacgaactgcgccggccgcaggtgtttgccaccgtcgccctgaccctatccgccggcttcgcggcaatcgtgcgctccatcgcacggcgtctgcgacgatagcgcagcggcggcaaacagacgacaaagggcatggttccggcggcgatatcgtcgacaccatgcctattcatatccgccgtatatccacccggctcgtccccgggccggccctacctctactcggtcaggtacagcacgttctcgtcaaggggggaacgacgttcatgtggtacccctccattttcaggaacggcttggagctgtcaggcttggcatggcctgacacgtcggcaactggtagctcgcgccggccagtccctccagtttgttgctgctgatgccggctggcacatagcaggatttgaatcctttcttgccgccgcagcgatagtcgctatccggccccatgagctcgatgccgacgtccgacggcaccttccaccaaccgtcaccacccgtgtccgtccggcgtgcagcgtgaccgactgcggatcatcggggctcagcatgagcttgcccgagccaaccgaggtggccttgcccttgtcgtccaacgtcaggcaccaactgtcgtctttcaggcagtatttgcctgctatcggctagaaatcgcctttgccgagtgcggtgcgaacatccgtcaggctcatgtccttggtgggcttggccgatgatgcaccgccgtccacgccggcgctgccgcccggctacttgacatcggcgtcgggcagctcaccccaatccaggtcgatggagacggtcagatagtacacggtgtcgtcgctgggagcgggcttcatcttgacgatgtcgcttttgctgccgacgtagccgttgtacggcatgaacgggttggcggagttattggtcatgtccgccgtggtcttgtcgtagagcttcgggtcacggtagatcaggaacggcttggtcgtgttcacggctttctgtttcttggccgcggccagcgcgtccgcgtcaaagtacccgtcgctttcgagcttgttcaggtccgcgccgaccggcacgaccagatagaagtcctgcatgtgatacgtcgcgccggagatattgttgtaatcgccgttttcgaccatcttgccgttgttgcagacgatgccgcctgccgtattcgagtcttcctggctggtgccgcaccagtagttcgtcatactggatcgcgggaacagttcgaacgcgccggtgtcaccggtgagcagatagtcggctttcgggctggagcagtacggctgctggatggcatcgcaggagctcagcgactcgtattcgccgtattcggtaccgtcgcgacctttcggataggggatgtacgagttgccttcgctgccatcgccgccatccttgaacgtgatgcagtcaccggagttgttgcaccacgttcccgcggccacaccggagacaccgagcagattgtcgccgccggtctccggggaatcgtgaaccgtgtaggcgtccttgacgccgctggcgtcgatgccgtaatacagcgtgaccgcatcgccttccgctaccgtggatccgggcatcgggtcggaaccggacactttgccgacgaacttcttcgaggcgaggcgcggcacgagcgtcacgtcatgtccttggctttccagttcggatttcaccgtgtcgacgtcccggccgacgatgtcgatgctgatggcgccgccgtcgctcttcgtggcgacgccgatgtagatgccgtcgtccttgtcgccgtccgacagcgcctgtccttcggcggggtaggtcgccaccacggaaccgattggcttcttcttggtgtcggacaccggtacctgcttgtaatgtaccggcacacccatcgtcttgaacgtggatacgaccttcgtggcctgcttgcccatcgtgttcttgggcacaccggggccacccgactcctggacgattaccgcggcgtccttctggacgcggtcgccgggcttcatgccctcgtatccgaggaacacgcccttcttcttgccggagaagatgatcgacttcgatgccttcacgcccttggctttcagctgggcgaccacgtcatcggcggtggcttcgccgccggacgcaccggagatctcttcggcggtaggcagcggggttccgccccagatgcccgcgcgatacgtgaagaacagggcaagaccgacacccaacgcgagggcgaccaccacggccacgatgaggccgatgagcttgcccttggatttgggcttcggcgtttgccctggcacggccggcgtcgccgctgatggctgggttgcgggcgcggccggagtcgagactccggcacctgacggctgggcgaactgctgggcttgcggccacgccggttgggcaacaggctggagcggctcctgaggtgcagcaggagccggcgcgaatccgccgcctggcagtggtacagctggagtcgccggctgttgcgccgcagagggctggggcatctgcgatactgcgggctgcgacgccggcgcggcctgtgatacctgttgttgcagcggctgcccgcagttcccacagaatttgctgtccgggctctcgtcattcccgcaatatgggcacttcatgcgtgtccgcctttctcccccgcccaatggcgtctctcatcattgcccgccggcgcgaaagcgctcgcgaacacatcaagaacatcataaaaccgggcgtcgtgcaacacagtgtcacatatcaggaaacaccaagcattcatcggtcaccctcgcacagtgacacgtgtggcggcccagcgaaggcgacagacaagcgctccagcgaaattcagtggaacagactcacgccgcgccgggccatgcagtaggcgttacccagccacgtgtgccgcgagttcggccacacggcccccagacgcggcgcgttctggctcatccagatgctgggcacgcgcccgtcggcgctgcgagagccgagcaggttgaacccgttcttgatctcaagccaatcggggtgctgcgtggcaatggcaagaccctcttcaagggtcagtggcgtgcgctcgtcggaatcgatgagcttgcgcgccacgtccggctcgcgattgatgtagcaggtgccggtatgcggctcgacaaccagatagaacggcccttccggcggctcgaacccgtcctgcggcaggaagcttgcgatgtcgcgcggaggcattgtcgtgaaaccggccatgcggttgatgctggttcgggcgatcagcgactcaggcgacaccagctcgcgcgtggggatcagcaggatgttcgagcccagatcggtatgctccaacgcatggatcagcggccgtgcgagcgcgcggaacgcggcggcgctcatgtccgccacgtccgggtaacccagcgccacgatacgatccagctgcttctgcgcttcctgcgatgctattgacatgcttccagagtaccgcgaatcccggccgcagcacccacccatcggcgaacacggccatcattcgggaaagcggcccgtcttgttccgcgcattccgtaccattgggtaggtgcggccatgtcactgcggccgcttgtataggaaaccgaatcaaacccagaggttgttatgtccgaaaagttgaaggtcggcattcttggcgccacaggtatggtcggccagcgttttgtgacgctgctggagaaccacccgtggtttgaggtggtcaaactcgccgcgtccgcgcacagtgcgggaaagacctatgaagaggccgtcggcccccgctggaagatggaaacgccgatgcccgagtacgtcaagggcatgacggtgcatgacgtcgccgatgtggccggcatggccgatggcgtcgatttcgtcttctccgcggtgaacatgtcgaaggacgagattcgcgcaatcgaagaggagtacgcgaagaccgagatcccggtcgtctccaacaacagcgcccaccgttggacgccggatgtgccgatggtcgtgccggagatcaacccggagcatttcgcggtgattgagcaccagcgcaagcggctcggcaccacgcgcggcttcatcgccgtcaagccgaactgctcgatccaggcgtacacgccggcgctggccgcgtggaaggaattcgagccgcgcgaggtcgtcgtcagcacgtatcaggcgatttccggcgcgggcaagaccttcaaggactggcctgagatggtgggcaacatcatcccgttcatctccggcgaggaggcgaagagcgagaaggaaccgctcaaggtgttcggtcacgtggatgccggcaagggcgagatcgtgccgttcgacggcggtctcaagatcacttcgcagtgcatccgcgtgcccgtgctcaacggccacaccgccacggtattcctgaacttcggcaagaaggccaccaaggaagagctcgtcgaccgcttggtgaactacacgtccaaggcgtccgagctggggctgccgcacgcgccgaagcacttcatccaatacctcaccgaggatgaccgcccgcaggtcaagttcgatgtggactacgagggcggcatgggcgtgtcaatcggccgtctgcgcgaggattcgatctttgactggaagttcgtggggctggctcacaacacgttgcgcggtgccgccggcggcgcgctcgaatgcgccgaaatgctcaaggcgctcggttatatcagcgcgaagtgacggcagcctgccgctgagactgaaattgcggctggagaccatcaaacggccgggttgaccacggattgattccgcagtcaacccggccgttcggcatatcgggtgtcgtcaccgacgcaggtgacatgtattgccgcgcggattacggcggaatcgtaccgtaacgatcatggcgactatgaccatggcgagcagcagcatgccggcgaccgtcgctgccacaaggagccgcataattccggtggaacgttccatgtgctcctccttcggctcaggagcgcgaatgaatacggaaggaggaggtaagaacgctcaaaccagataaattgaccacccagccggctcctgctgtcggagatattccgcgtagcgggcggggtggtcaattacgcgattgcgtcaaaaatcagcgaccggtgccgccgtagaccacggcttcgacctgatcggcgtcgaggccgtaggcggtgtgcagcgcgcgcacggcgtcgtcaagctggtcgagcgggacgagtgccgcgatgcgaatctcggacgtggagatcatcagcacgttgatgcccttgtcgctcagagcggtgaagaacttggccgccaggccggaatgggtcttcatgccaacgcccacgaccgcgaccttgccgacgctcctgttgacgtcgaacgacttgtagcccagctcgtcatgcttgtcgatcagcacgttctcgacttccttgacggtggattccggcacggtgaaggagatctccgcggtgcccacggacgcgccggcctgcacgatcatgtccacattcacaccggccgccgccagctcggtgaacactttcgccgccatgccgggctcattcggaacgccgcgcacggtggccagcgcttcgctgcggtcgtgcgccacaccggagatgaccggggcttccggaccgaggtcggggaacaggtcacccatggatttgctgttgttgtcgctcatgttttttcgcctttgtatttgtgtgaacggtaaatcaggtctcgaatatgtcgtatgtcagtggacggcatcagtcgatgttgggcaggctgcgcgggtcgactccgtcgggcacgatcagcgtgccgggacggtgcgagaaggagctgcgcacgtgaagcggcatgttgaaccgctgcgcgtactccacgcagcgcagtgccagcaccttcgaaccgcaactggacatctccagaatctcgtcgtatccgatgaccggaatgcgactggcctttggcacgatgcgcggatcggcggtgaacacgccatccacgtcggtgtagatctcgcagatgtcggcgccgagcgccacggcaagcgccacggccgacgtgtcggagccgccgcggccgagcgtggtggcgtctcccttggcgttgatgccctggaagcctgcgacgatggccacgtctccgagcgacagcgcgttctgcacgcggtcgggcttcacggccttgatgtgcgcggcgccgtaacgggtgtcggtgaagaatccggcctgctgaccggtgaacgaatgcgcacggtccccggcggcgtgaatggccatggcgagaaggctcatggagatgcgctcaccggcggtcatcagcatgtccatctcgcgctcgggcgggttggagtcgatgctcagcgcctggtcgatcaggtcgtcggtcgtgtctcccatggcggagacgaccacggccaccttgttgccttttttcttggtctcgacgatgcgcttggccacgcgcttgatcgattcggtatcggcgaccgacgagccgccgtacttctgcacgatgagagccactgctgtcctatcttctcgcggaatgcatctgcgtcaatactacgcaagcggcacgattataggaatttcggcactgccgcgcacgcgtgcgccgccatgcggacaggaacggccgcgctgcgggcacaggtatccgggcgatgattcgcgtcggcggcgccgggacgggccgacgctggcagccgcgtttatgcttcgcggcgacctgtgagggcccgcccgagcgtgacctcgtcggcgtattcgaggtcgctgccgacgggcagaccgctggcgagccgggtgaccttgatgccgagcgggctgagcagacgactcaggtatgtcgtcgtcgcctcgccttcgatgttggggtcgagtgcgaggatgacttccttgacctcgtcagtcttgaggcggtcgagaagcttggggatgttgaggtcggccggtccgacgttggccatcgggttgatggcgccgccgagcacatggtattggccgcggtattcacgggtgcgctcgatgctcatcacgtccttcggctcttcgaccacgcagatcaccccgtggtcgcgtctcgggtcggcgcataccgggcacggactgacctcgcacacgtttccgcagatgtcgcagaaccgcactttttccttgacttccgtgatggcgtcgaccagcttgcccgtctcctcgtcggaggccgacagcagatagaaagcgatgcgctgcgcccctttcgggccgatgccgggcagtccggcaaatgcgtcgatgagtcgctgtatcgcgccgtcatatgccaaagccattggtgtgctcactccgaatcatgtttgttgacgtgctggatgttcctggggttcttggggtcgtcggggccgtattcctccaccggcttgacgacttcgaagaactgcttgacgtcgtcgagactcatcgtctcgggcgagccaagtgaaacgtcattcatcgaatattcgtcgtcttccggtgccacggtcggcatgggaatgtcctcctgcgcatacgggtcggctccggcgaacggatcggtgtcgtcatacgcagggcgggatgctctctgaccggctgcggcaccgggagtctgctgcagatgcgtcgttcccggttcgactccggggttttccgggcgcccgggcgcagccaagtcgtcggagggcccttggagagctgccggggagcctgcgcttggcgcggcgatgctcgacgaagcggaagcgactgatgacggcatgccagcccaggggtcttccgcggacatggactccggcacggcggtggagccagggttggtgcgctcggagtcctctcgcgactgtgactgcgcatgggcaacgttctgaggtgtgccgggcgcgtcgccaccgcgtacaccgtcaacgggcatactgttaccgccgtcgttggcccacgggtcggtgtcgtcgctcaaatccggcacggcgatgtgtttcgcgtgatgaccctcatcttgcggagcattccgtgaaacatcccgtgaaacattgtgagacgcatcgtcagtcggtgaccaagcgtcgccagcccccgcttccgggagcgcccacggatccactgccgactgcgcgtccgcacgcgaggtatcctgtgcgaccgcccggttattgtcgcggtcatgagccactgtcgcgtccggcgcgtcgggtacggctcgatggacttcgtccgtatcggccgatgcggtgtcgccgctttcgggaggagtctgcggctccttggcattgttgccgacgctcatcgcctccaatgatgcgctgagactcgctttgacgatctgggcactgatgcgctgctgctcgtctgccggcagctggccgaacggcggcgcgacctgcccgtcggccatcttcttggtgggcgcgagctgcacttggtcgccgaacgccttgcgggtctcagcgcgcatgatctgcaccacgttgcgggttccgccgacttcctcaccagcgacggccttcgcgaaggcatacttgctcagcgccttgtcgaacttgatccacaacgtgccttttccgcctggctcgtgctgttccaagtggatgcgcggcaccttgctgcggttcacgtacgcggcgacgtccgccggcaatccggcgaccagtgcatcccagcgttcgtccggcgtgcggtcgtcgccctgcggagaggattgcgcggctgtcggctcaccggccgacggtactcgagcggcggacggtgcttgagcggcgggagacggggcaccggcttgcgcatccgctgttgcaggcacttccgccatagtgggcgtttccgtctggagtgcgcgatcaggttgggtgccggtggttcggctcggtgacgtattcgtctggcttgtcgccgattggcgagcgtccgtctgctggttgcgagcggatccgatgaatcctcccctgcgcggagtcgtcccgcctgaccggctctcggcgatgccgcctgttcgcgtattcactcctgcagctccgcggccagtacctgcagagtccgccccgggcgcagtgccgcccgcggccggcgcgacatccagtccctctcgcccggcaagtaagcgcgcggcgagcaattcgagccgcatgcgcggagaaatcgccccggtcatagaccccagggtggtattgatggtttctgccatcgacgtcaacgcacccaagccaagcgacgacgcctgcctacgcaggtcgtccatgtcctcggcctcggcagcatcggaaagcacgctttctgcctgagcgccgcccaatgtcagcaccagcagatcacgcacccgcgccagcagatcctcgacgaaccgacgtgggtcgaatcctcccaccacgactttctgcaccacgccatacagcgcttcgccgttacgcgcgatgacggcgtccacggcctcgccgatcagcgcctccggcgtgaagccgagcagcgccacggcggcgtcgtgggcgatcacgccgtcaaccgcgccgaccatcaactgatcgagcaccgacagggtgtcacgcaccgaaccgccgccggcgcgcatcgccagcttgagcacgccgggttccggcttgatgctttccttggcgcaaatctcctccagatacggtcccatgacctcctggggaaccagccggaacgggtaatgatgggtacgcgaacggatggtgccgatcaccttgtcgggttcggtggtcgcaaagatgaacatcacatggtccggcggttcctcgacaatcttcagcaacgcgttgaaaccctgttgggtgaccatgtgcgcctcgtcaagaatgaaaatcttatagcgatcccgagcgggggcgaatccggcgcgctctcgcagttcacgggcgtcgtcgacgccattgtgactggccgcgtcgatttccaccacgtcgatggaacctggaccgccagtggcgaggtccttgcaactggcgcattccccgcatggatgcgaggtcggccccttggcgcagttgatgcaccgcgcgaggatacgcgcggaactggtcttaccgcagccacgcggcccggaaaacaggtacgcatgcgtgagcttgccgctgtcgagggcccgcatcagcggaacagtgacctgatcctgaccgatgaccccctcaaacgtgtccggtcgataacgtcgatacagtgcaagtgccataagctccaacctatcgcaacccggctatttccgggtgtctttccctattgtccccattacttgcgcacgcatcgggggcttgcccagatggtgccgccgcggcgacgtttgcggactcgtcaacgtcaatcgttggcctgtcggccgaaagccgccggacaggcaggctccgctcaggcggactcgccggtcagatgaattcgccggtcaccgggtcacgcccgtcgcgctcgatcgccgccatgatatgctcctcgctccggctgtcatgccagtgggcgaccgcaggcgggaccaatacgcgcaacgccttggcctgcgcggtgacggtcaccggaagatgcccgacgtactccccatcggccatcagcaccggaggctcgtctccctcgtgggcgcgggttatctccacctggcatacacgcttccagttgaatatctggctggcgagcaacctcccgttataggcgttggacagcgctttggcgcattggccgacattcggcttgcagttcagccacaccagatccagcattccgtcatcaagcaaggagtatggagacacctctagtccgcctccgatgtaccgtgcattggcgactgtgagcagaggggcgatgatgtcgtgttcctccaccgtgccgtccgacagcgtggccttgacgtgatagccgtactgtttcatgcgggcgatctccaccagcaccgccgcagcgtatcgtgctgaccctccgggaaggcgcgaatggttggcccgatcgttgatgcttgcgtcaagcccacaattaagcatccccgcatagtatcggtcgatcagcccgttcaccgggcggccttcctcatccaccacgggctcaccggactcgccatgcaccatgcaggcgatctccgtcgagcgcacgcgtcccatatcgacatccagataggtgccgcatgcgatggcgccgacgatgccttccaccgcggttttgacccggttgacgggtagtttcagacctcgcgcgaaatcattgcccgaaccgaccgccacaatgccgagcgggatgccgctgccgcagacggcgttggcccccaaggcgatcatgccgtcgccgcctacgaccaccaagtagtcgtatagggcgcggttctcgcgagcggccgtcagcgaatcatcaaagctggtgccggtcagatccattacgtcgaatccatgccgctgtccggcttcggccagcatcgtgaatacctgttcgcccacgacggcaccccaccccttgtttgaaacgggattgccgatcaacgccaccattgtcttcgcttcgcccatacgtcaaacataatgcatcaacggcattccccgccagtacaggctccgcaatcggtctcggcatcggcatcaatgctgtctgcccacacccgccgcgagtggccccatcgactattcacagctgatgggcccggcgcgggaacgctggctgacacgtgacatgaatggcaggcgcagcggcacggacaccgtcacgacgatgtcatctccctcgacggcgcacgactccagttgcgcgtcattctctgccgcggcacgccgccctacggcacacggatcggatgcgccaccagaccagtacgccgacgccgccgacaatgccgtggcatcggcagcgctccgcgcacgcgaccggcagagcagcgcgcctccgaccgacgcgacggtcgctatcagtgcggccgcgagcgcgatcagcatcacgcaggccatcgttcccgacccttcatcggattgcatcagccgcgagcaataggctcgcacgggcgatggtctcctaggttgaattcgttgcgccatcgtgttttcctttcgtcgctattccaccgcatcagaggcaagctgcgcaggggagcttgaccaccccagcaactgcgcgacagcctccgccagcgggagggcaagacggcacagtcgctccacgacagccctccgggccctgcaattacagacatgctacgcatgccgcccattgggttcactgacgttcacccctcgcctacaaacagctctgctgtttgctcacggctcggcccgccagcgagggcaagacggacttaggcatcaccgccatcctgtggccgagccggttactttgacgggtagaacgccgaatggatccggcagcacggggcattgcgccgtcacgcgtatcgaatgaccatcatcagcgaccgacgccaccgcgccttcgcccgcgataccactcgccacggcgttgacggacatccccgctcccgataggccgccttccctcgtcaccagttcgcgaactacggccgacgcggcatcctggcatcgcatggacaccgtgaccgttctcgtcaggcagagcaacaccatcgccaccatggccacagcgggaagcaccaccgcgaactccgcagtggcggctcccctgtcagcatgtgacatcgtcgccatcgtgaatgcccgtcatcccacactcaacgacttcttgacgatgttggtcagcaacgtcttgatggtgtccgatttgagcaacgcgaccagcacggccgcgaagcccgtggctgcgaccagcaccaccgcgtactccgcggtggtggccccttcctctggctccgcgctcaacgtgcgcagccgcgcatccaacaggcaaatgccccgccgcgccgacgcccccatgttgcccaccgtacgtgtcatcgccgcaataggcccggtacgtccgtcaacggcaatcatcgtctcctcgatattcatgacaatcctttctcgactgaccttgcccaactacaaggcactttccactgtgcctcatcaggcccgcccaccatcgggttttcgggcaatgtggtcgaaggctgccgagttatccacaatgcggcgtgtcatccacacattatgtggatgacagacggccgtgcagcattcttcaccgaccatcgggcggcgtcgccaccaagttcatcccacgaacgccatcaccgaggggagtatgcctagaaacacgaacgccggcagcatgcacaatcccgtgggcagcagcagtttcaccgacagagacgccgactcctgctcgatcgcggttcgctcgccttccatccactgctccgaagccgtcgtcagagggccgatcggcgaaacaccacgagtccacgatggctccaacacgccacgaaggattgccgaagtctccgcataatcaccgaaatcggcggcattccaagcatccttccatgacgatccgcggtgcagagcgtccgcaaccgcacacagcccgccgccaagagcccctccgacagcctcacccacgtcctccagagaacgcgtgacggacatgcctgaccgcagcgacaccgacaacagtccaatcagcaacggcaacgacacagcagcacccccttctcccgcaacatcggacgacacgccagtcaagcggcccgaccgtgccgagtccggccatatcatcaatgccatcaacaccatgacggcgcacgccatcgcgttccacatcaccccaccccttaatgttcatgacggcaatcagacggtatcaacgttcgtaccggtgttccgcatcatcgatgacatccacagcagtcccagcgcgtagcctgcgccgcccaccgccaggcacgcattgccctgcgcggagccgaacagtacctgcaccgggcgagcgcccagcagctctcccaaacctatggtgaccaacggcaacgcgcccaacagcgccgccgtcgcgcgcggaaccgcgaaagcactgcgtcgggaatcatgcaacagcctggaaatccgatggttctcgccgaccacatccagacaatcggcaagggagcatcctgaccgctcgcacatcgcacaggccacggcgagttcgaaggcgacatgttcggcctgggcggcgctctcccccggcattcgctgtcgcatcagcagccgtttcaaccggcttgcggtcaacggcacccctgcgaatccgctcccgtcgacatcggcaagaacacctgagatcatgccgccggcccgaacagacgaactcatatgcgcgatcacgccggacagccccatcacacggccattacggacggcatcaccggcaccggtctttcgccctgctcgcggcaccctcgaagagaccggcaacagggcacggccgcgaggggcatacggccacagcatccatgccagcacgaccatcagcgcgacgcatcgcggcaacccacccacgctcatatgtctcacctcacatgcctcattcacatgatccatctcacatgccccatcgcccggtgaaatcatgccagcgcgggcatggcatcatggcgccctcaccgtcccacaacgccaccacgtcgccggacaacactccgtcgcgcatgccgaggcacccgatctgggcgattctccggcgaccatgatgccgctcaagatgcagcatcacgtcgaacgccccctccgccagcatcgtcaacgtatgcgcgtcaaggccggccagcatgcccagcgcgatcaatcgcgccggcacccggtcaatgccatctgcgtgcaatgtggtcataccgccaaggtggcccgaattgaacgcgcgcagcagatcggcgatttcctcgccacggcattcgcccagtaccacccgatccggtctcatgcgcagggtcgccttgaccagctccggcagtcctacggctccggcgccttccacattcgcccctctcaccaccatcgacacatggttgccgcgtccgagatcccccaattcccgaacctcctcaacggtgacgatacggtccaatgaatcgcattccgcaagcagcgctttcagcagcgtggttttgccgctgcccgtgccgccgctaatcagcactcgagcccggttcttcaccaaattccgcagcaacgtcaaccagtccggcgggaacatcccagcatcacgcaatccggtcaatccgagcaaccgccgatccggaaaacgaatcgtcaccgccgcgccctgcgcgaccagtggcgcgatcaccgcgtgcacgcgaatcccgtcctcgctcgacgcgtccgcaatcgggcaggcgtcgtcaagacgccgtcccaattgcgcacacagccgcaccgcatattcacgcactattcgcggcgtgcgcaacggcataggcaaccggcactccgtcattcctccgcctcggtccgcccacacccttccctcgcaggtgatcgcgacatcggtgaccgttggatcgcgtgccagcgcatccaacggcccaaattcaatcatgggacatcacctcccaaccccgtctcgatggcaccgacgactgcatccaccgccttgcggctgctcttgccgatagcccggatgcccagcccctccagcacatcgccatgcagcccgcggtccggagccaccaccccggccagctcctcatgcagatactccgatgcctcgtgcgcgtcgaccacgccgccgcggcgcgacagtccgcggggcacgacaccgaccataatcgggcgcgactccccttgacgtatcatcatcgccctcgccgcccgagcacgcgccagaccgagcaccgtcagctcggccaataccacctggcggcactgtcgcagcatcggcagcgaatgcaacgcgctcggagccccgatatcgacgaccaccacatcattggcctgcgccagcgcctcaagtacggcagagaccgtccatggctcaggatccgaaccgttccaaggttgactggcgagcacccccacgcgctcccattgcggcaactcgccattcagcgccgcaccttccgttttcccgagtggtatatcgactgtttgaaatcgcaggcccggctcgttttcgatgcccagcagcacgtcgatgcctccggccgcgaaatcgcagtcgaccagtgcgcactgcaacttgcgctgggccaagcgccatgcgaccatcgccgcgaacacgctggttcccgctcccccggacgcggaagagaacaccactgtattatggcatcctgcatgcgtcagcgtgccgatcgactgattgccgtccacggatgagaccgggctcgggcatacgactcgcggcatggtcatgggcttgcgcgcacgcatccgatggcttgcagcatccgagtcaagccgggaaacctgcgcagccggccttcgccaagcgtccggggaggcccggcgaggcggcatgggaacctgccgcgacgccgctgcacccggcggagcggcggcgccaatcttctgaactgtaacgttgtgtgtcatattccgattgaaacgaatagcgccgcagcggcgcaacgtgagacgacaatgtggtcgaaggcccgcgacttatccacatcacggcgtgttatccacagtttttgtggacagacgacgcctagatgggcatattcgcgtgatatggaaccgtctccacttagcatccagtcgaaagcacccggcagcggagtcgggaagaatccgagccaacctctctgcaaccttcgcccgtgcgcatctcgccgaacgtcgcataccccgcgctcacgaacgcccatcgcgcctccgatcatctctgccggtcagtcggtcacggcaaacattgaccagaacccacccgcccgtcataaccaccggcgtgccacaccagaggaaaaacacacaaaaaatgcattgtgtggcttttccgcaggcctcacaatgaaatgtgaaccctcacatcgcatggtgtggtacagcacaaatcatgagaaccgccattttccaacaatcccagaagcaccccaatatcctccccggccacaccagccccaaaaccgcataaaatcacgtggtgtggtacagcccgccgccaactgccgtccgccaccaccatcgccaccgcaacacgggccgaaatcgccgcaatccgcgattcggcgaaaaatatcgtttcgaaggccaaagcccggtgattgcgagttcggcgccagaaaaggtcgggccgaacgatcacgctgccccattaacacaccggcaatgcacccgggtaaggcacacttttgaccacttaacccaatgattgcacacaggaagtcacgcggaacagcaggagccaacggtccgccccccaacccgagccaagcccaccctcgccattagaccgccgcacatggaaaaacccgccggagcgggtttttcctgcaagtccatcttgagcagatcgctgcacaacctcatcgtcgtaacggtaagtctttccattgcccgttcaacgtaacagtccttcgtgaccatacactattgtgggcctgctcttaagttgtccttgcacttcataatctaggcgcaacaccgcgataccgcaactcacccaactacgttgtgcgattttttgcgcaagtgttcgataccgctcaattatgacggaaaactgtcacctcatgttcctatcggacgggttcgttgttcacttgtgtgcggaaccgacgacccatcggcgtgtcgccgtaccatcacccgacaccccatccgcacgaaaatggtaaacaaccgctgaatttcttacacgccgcataggaaactgccatattctcgcataaagttatatacatggcacaaacatttgacgcaccttcaaaggctatcctgcgcagccaaatcgccgagcacatagccgagacagacaaacccgacaagcgcgagccgcaagccggcgaagagccgctgcccgcggatcgctatttcgaccgagaactcagctggctgaagttcaaccagcgagtcctcgaactcgccgaggacgaagaccagccgctgctggaacgctgcaatttcgccgcgatcttcgcctccaacctcgatgaattcttcatggtccgcgtcgccggcctcaagcgccgtatcgacaccggcatcgccgtcaccgcggccagcggcctgagcccccgccagcagctgcgtgccatcagcgagcaggcgcaccgcttgcagaacgagcacgcgcactacgtcaccgagaagctgctccccgccctcgctgacgagcacatcgtgctgctcagctgggaccggctcactaccaccgagcaggaacgtctctcgcgctactaccgccagcaggtcttccccgtactcacgccgctcgccgtcgaccccgcgcacccgttcccctacatttccggcaactcgctgaacctcgcggtgctggtggagaacccgaactccggcaaatcccacttcgcccgcgtgaagatccccggcaacatgccccgcctcgtccccgtcgacgacctgaccgacgaggagagccgcgaggagcgcttcgggttcatcacgatggagaacctcatcatcgcgcacctcgaatccctgttccccggcatgatcatcaaggaggcgcgctcgttccgcgtcacccgcaacgaggacatcgacgtcgaagaggatgacgccgagaacctgctcaacgcgatggagaaggagctgctgcgccgccgcttcggaccgccgatccgcctggagatctccgacgcgaccagcccgttcctctcccagctgctcgccgaccagctcggcgtcaacccggaagaggtctaccgcctgcccgcgccgctcgacttcaccgtactgttcgaactgcagtcgctcgaccgcccggacctcaagaaccgcccgttcatcccgaccacgaaccgtcagatcgccgaagtcgaatcgagccgcgctcaggacatcttcgccgcgatccgcgagcgcgacatcctgctgcaccacccctacgattcgttctccacgtcggtgcaggcgttcctcgcccaagcggccgccgacccgcgcgtgctggccatcaagcagacgctgtaccgcaccagctccaactcgccgatcatcgacgcgctgatcgacgcggcccacgccggcaagcaggtgctggcgctggtcgagatcaaggcgcgcttcgacgaggacgccaacatcgcctgggcccgcaagctcgaacgcgccggcgtgcacgtcgtctacggcatcgtcggcctcaagacccactgcaagctcatcgaagtcgtccgccaggagcaggacggcctcaagcgctactgccacgtgggcaccggcaactacaacccgaagaccgcccgcctgtacacggacctcggcctgctcacctgcgatccggtggtcggtcaggacctgacccgcctgttcaaccagctgagcggctacgcgccgaagtccagcttccaccgcctgctggtcgccccgcgcaccgtgcgtaccggcctgattcagcgcatccgccgcgaggaggacgccgccaaggccggcaaggaagcctggatcaaaatcaaggtcaactcgctcgtcgacgagaagaccatcgacgcgctgtaccgcgccagccaggccggcgtcaagatcgacatcgtcgagcgcggcatctgcgcactcaagcccggcgtgcccggcatgtccgacaacatccgcgtgcgttcgatcctcggccggttcctggagcacagccgcatctacgccttctgcaactccgacggcccgcagatcggcgaaggccccatctccggcccggaagtgtggatcggctcggccgacctgatgcaccgcaacctcgaccgccgcgtcgaggcgctggtccgcgtcaccgcgcccgagcagatcgacgagctgattcgctatgtggacctgcagatgtccgactccacggcctcctggcacatgcagcccgacggcacgtacatccatcattcgcgcgacgacgaaggccgcccgctggtggacagccaggaatatctcatccgcaagcaccagcgccgcccgcgcaccaacaactgacatggcacccggccgggcgcccgataaggcatccggcacgagcctcgtgcaccgcatcttccgcaagacaagcggcgcacgaggtacagtaggtgcataagccgatggccgacccgcaagggtcggccatcgtcattacagacgagaaacaacgtagtcatgcagccggtgaggcataatggaagggtgagtggtgaggtgaaaatcgtagaagctgcaggcgcggtgctgtatcgccgcaatactgattttcaaggatggatgaagttctcggacgacgggcggcagacgtccgcggcatcccgactggccgacttcgatacgcttgaagtgtgcatcgtgcaccggccaaaatacgacgattggagctggccgaaaggcaagctggagctcaacgagacccaccgccatgcggcggtacgcgaggtcagcgaagagaccggagtgccggtcgcgctcggaccgttcctcggcgaaatcgaatacccgcttgccgaggaaggcaagaaaacccgccgttccaaggatcgaaccgtcgacacgaagcacattctcttctggatggcaaggccgatcgaccccgaggacgccgtgcggcgggccgacgcgttcggccccgtgcatcgcgctgacgtgggcgagatcgacagcgtcatgtgggtgagcgtgcagcgcgcgcggcgtatgctcacccattcgaccgaccgcgatattctcgcgttgttcgtcgaccgtgtggaggaaggcgcgctggacggcgacatgctgctgctggtgcgtcacggcaaggccgagccccgcaagcagtggacgggtaccgacgacaagcgtcccatcacgccgcgcggagcgtcgatggcgtattcgctcgaccgtgagctcgcctgctacaatcccacgcggctggtcacctcgccgtggctgcgctgccagcagaccatacagatgctgtcatggcagaccggattgccgctgcatacggccgaaccgctcaccgaggacgcgttcgccgccgatccggaagcggcgtggcagtgcttccacaaggagctgaaaaatacgttgcagcgtcacagtgcgaccgcggtctgcatgcatcgtccggtcatcggcggtattttcgggcatctgcgcgaactgtgcgcgacgaaatcgctgatgaaacggctgattccgtcctcgccgtacatgccgaccggcaccgccatcgcgctgttcgtggtaccctgcggtgacaccgtttccatcatcgacattcagaaggtcacgccacttgtctactagcatgcatcttggttcaggctccgtcgttcccagccgcacgggattcacgccgaccggctcgccgcggccatcgcgccccgggcagatcgaccccggtctcatcgagggcatcgccggaggcgccgatcccagcgtggtcagcgaaatgagtcacgcatcggcggccgctctgctcgaccgcgtgcatcactccgctgatccgcaggttgtggaacgggtgctgacgctggtcgaccgcgaaggcgtggacatgatcgccgaactgtggagccggtcggaacccgactcgctgccgggcatcatgtggcggctgtacacgttgcgctcatggatgcggcgcgaccgcgatctgatctcgcggctgtggcggctcggcgaaccggtggcgaccgccgcgtcggccatcgcaggcgtcgaccaggcacccaccgaagcggacatcacacatacggcagattcgattctcgcaggcgcgttcaccggcgatttcgccgtggctctggagagggcgagcgcgttcgtcgacgtggtggcgcagggattgcgcgtcgaagcgcggcacatggtgcggcaggccgaggccaaggccggctccgaaaccgcgaccgccgcagacctggccgaagtccatgtcatgcgctcccgcagcgccaagctgatgcacaccgccggcaatctcatcgccacgtccaaggatttccgccacggagcgcagctgtggcgtcgcggcaaactggactgagccggcgcaacacgcggacagcgtaacagggcaaacccggatatactgatatccgcgtcgggccatgcatagccccgggctccattttttgccgctgcgagcggcctttgcgccgacaggcgctttcgtggttcggcgcattctctttttctttctcaccccgttgaatccgcaacacgctactgctgatgggacgagacgtacagcagacagcggaaaccgtaggcgatgtactgcggcacataattcagcccccgtcgcgctcatggagtcctcggcaccccattcaccctacgcatcgtcggtggccagcagaccgatcggcgacagctcgactatacggaactgggcatgtggcggaatttcacccactgcggcgtgctgtacgcgcatgtgccggaggtcgatccgctcacgtcgccgcctgcgccacgggatgccgcaggcgccacggcggagccagcaacggcggctgatcccgacatgtcggccgaagcggtgcgcacccgcatcgaggccgcccgtatcaaggcggaaaacgaactcatcgactacatccgatcccacgcggacgccataggtttccccggcgagctgggagtcagccgcgccgtcaacggcatctgtctgcgagtgctcaccacacgcggtgatgacgccttcgacctgatcaaagacgtgtcggatttcgtcgtcgcgtaaaatcgcgctctcaaaactcgcagatacagcatgaatatacgcaaaaagtgcttgtatccgcgagttttgagagcgtccctgacgctattgccgcaccaacggcggcatcggccgccacttcgggtcgtgcatcagcttgtgcgagtcccgccatcccttggcgatctgcaccagcccggtgcgcacgtgctcgcggtcgaccgcgaccaggcgaataacctctttcgccaccgtgacggccgttcccagggcgaacagcactggccggtagtcgccgtgcaccatgaagtaccgggccatgtacccgcggttgcgcaggatgtggtaccggttcatgtccgaggtggagttcagctgccgcaatccggcgatgtcccagttgctgatgtcgcgcgtgcgccgcatcaccacgtcgggcaccacaatcgagttggtgaccttgctggccagatacccgtacatcgtgtcgtcccagtagatgaagaaccgcggatcggggagcccgatcttctccacgatgcgcctgcggaacagcccgccctcgaaacacagcgtgttcatcacgcggtacccggcggagccgaatgcggccggcgcgatcgggttcgggatgcccagcggcacgatgaagttgtactgccagtagaacggcccgccgtcgaaatcgagcttgccgccctggatcacgtcatggtcacgaccccatttcgcgagcttctcgatgccgtcaggcagtacggcgacgtcgtcgtccatcacccagaaccattccgccccgagatcgtacgcgacttttactccgacggaaaacccaccggcaccgccaagattgtcggtttgcggagcgtacaccacacggctcgtgccacctttgcggtcggcgtccgtcgtcccccacagaccgtcggccttctcccggaattcgtcgaccatgtcctgcgtctcgtcggagtgttcgttgtcgacgatgacgatgcgccatggcgcgaccgtcagctgcgcgaatgaggccaggagttcctccagcaactgctggcgcttatatgtcaccacgatgatggcgagcttgtcgaacaccgcacgggcatcacaggtgtgctcgaccgtggcttccccagttttgtcgttcctgtaagtcatacctttcattgtgacaccgtttatgtgaaggaaagtgatagtcacaggattgccaccagacaacgccataatgtcatgccgacgtttccggccgtgcagctaccgttcagagagtatggaggtgggtcatgagggcggcaccgcccggcgcgtggtcagtcgccggagctgctgtcaccggcgctgccgtcgccgctgctcgacccgctgccgtcggacgagcccggggccggctcgccgggcgcctgcccgcgcgtgaccgtcaccgtgttctcggagccatccctccacataatccagtccacggccgtatggtcgtagtcgtccgcgtcatcgtccgacggggtcaacgtgtagctgccgaccgtctcgcccttctcgtcgacgatgatgttctcgtccgtggttttgacgtagaactgcttcagcagatagttggctccttcgaactcaccggagttcagcatcaggcgggcccaccgcccgccgtccagcacctcggtgaccttcaggtcgcgcgagaggataaacgcacgcttgctgtcgctcgactcatcccactggaaatacagggaaccgtccgagaactggccgaagtccgtgaagttcacgtactggtcatccttcgtgttgatgttcagcaggtcggtgacttttttggtcttgcccgtgcctgcatccagaatcagcagcttgttgccgttatagctttcggagggattgagcacgtactgattcgcgccgaaccgatacaggccctgcaagtcgcatcggtaggtgtcgccgggcgagcagtagtccgaaggaatcttcacgatttccttgttgctgtcgatggaatacaggtggtatgcgctgtccttgaccacatatgtgtcgaacacgtggtaatcgtccacatcgacttcagtagtgttcaacgactggtatccgccgctgtccttgctgatgctcacgctgtccttgaacgtctgcaaggtctcggcctgcttcgcgccgccgctcaatcccatgatctgcttgtggccgatttcgacctcacgctgatcgtcgttgacagtcctcttctccgtcgtcttccagcttttctcgatggcgacgcgattgttggattgcgcgagcacatcgaattcgtaatcctgctgcaggttgatcaggttgtcttcctcggtgcgcagatcgatgcgatcggacaattcgccggatttcaaatcgacctgatgggcgaacaggtgcacggtttccggcgtggtaccgaccgccttggtcttgaccgcgtagatcacgaacacggccgggttgggaccgtatgtggcggcgacgaccggatcggagtacatcttctccccggatttcagagccgagaagtagatcaccttcgattcgtccattgccggcgtccagacgccgaacgcatattgcccgtcatcggcggattggctggaactgccatagtcggaatcgctgctggagctcgcatcgccgttggcgcagggcattacgtcggaaaccactgcgccgccgtcccacccccagtcggaggtgtcgtagttgcagacgaagttggtcatggtgacttcgctgaccgcttttttgccttcgatctgcgtcggggattgcttttgcgttttcttcggcgttgcatcagtcgtgtcgctggtctgcgcggggcccgcggccgcgttcttcctgccgtgaaggatgaggaatgcggcaactccgccgacgacgatcgccacgacgacgatggccgcgatgatggcgatgatgatcttgcgcttcttgcgttgcgcgggcgtaagtggtggcttcttgccgggttgggattgcgacccgggctgaccttggggtgcgctgccgccgttatccgcggggcccgctggctgcgggacaggcggtaacgtccccgtaccgggtactgtgttcggagcgaagccggacgcggctgtaccaggttgaggcatctgcgccccgctaccgggcgctgcggcggcaccgcttgcgaccggaatgccgcagtatgtgcagaacgccgatcccgctggaatttcattaccacatcgagcgcatctggccatcatcatcccctgtctcttcgttacgacagtcataaccaattcgagggattttgaaaggccgcgaagccctgcggccgggcgcgatgtcacgcggtctgggctatgatgaaggcgcaaccgaacgggagccgcaaggctgagaggaagcgacgcttcgaccgtcaacttgatgcgggtaatgccgccgtagggacgagttgtccagtcgcagcgcagcaacaatcggcatccgccaaccgatggtggacggttcccagccaaacgcaccgggcatcccggcatataacagaacaggcataacgaaaaacgcatgattcgggtcatggaggggcgcaccacctcacaaggtacggcttgctccagcgacccgtttttcatatcggcggacgccggcgcacccgatcggagatcgaccagcaacggccggcagcgcaatgtcgccgatatgggaatcacgccagcgaccgaggagggacacatgatcatcaacgggcagcaggaggacatcgccacgccgctcagcgtcgacgaactcatcgcgcgcaagggccttaacgcgggacgcgtggcggtcgaggtgaacggtgccatcgtgccgcgcgacaagcgcgcacagaccatgctgagcggcaccgacaccgtcgaaatcgtcacgttcgtgcagggcggctgagagcccggcaaacacgcggcaaggcatcggcacgggctcatgccgatgccggccagcgaaccgcactccgacccgaataccgcacgcatcaagcgtcatatacctcaaagaaaggtaccatcatgaccatcgcatcaaccacaccggccgcccaatcggacgacccggtgctcgacgaactcatcggcacggcgacgaacaccgcgctgctccccgaaccggacgcgcacgcctacgacgacatcgcgaccggcgacgccgacccgctggtgctcggcgggcacaagttcaccagccgcttcatcctcggctcggggcgctacgacctgaacctcatcaaggcgaccatagagaacgccggcacacagatcgtgacgatggcgttgcgtcgctgccgcacgaccgagaacaacctgctcgactacatccccaagggcatcacgatgctgccgaacacgtccggcgcgcgtaacgcggaggaggccgtgcgcattgcgcgtctcgcccgcgaggtctgccagacggacttcgtcaaggtcgagatcgagcacgagacgaagtacctgctgcccgacaacgaggagacgattcgcgccaccgagatgctcgccaaggagggcttcgtggtgatgccgtacatgttccccgatccgatcgcggccaagcggcttgaggaggccggcgccgcctgcgtgatgccgctcggctcgcttatcggctccaacaaggggctgcgcatgcgcgacttcatcgaggttatcatcgcgaacacgcacgtgccggtgatcatcgacgcgggcatcgggcgtcccagccaggccgccgaggccatggagatgggcgcggacgcggtgatggcgtacacggccatcgcgagcgccggcaacatcccgctgatggcccgcgcgttcaagcacgccatcgaatccggccgcgaggcatacctgtccggtctgggcacggtgacggagggccacgccgtgccgtccagcccgacgaacgccgccgactacctgcactgagccacccgtactgagtcgcctactcacgtcgccgcccggcagcgtgcatccatacgtggggcacgctgccgggtgtaccttaatctcgcgatgacgcccagcccgcggcccgagaccccgcgatcacaggtcaacggccatcgccagctccaggtcgtcgtccagttcctcgacatcgaagtcgagcttcctgagcacgtcgtcattgggaacatcgccaaggggcgcatcatcaccgtcgccggggcccatgtcaccgggatcgtcatcagggcgcatcagcatcgattccacgacctcatcatattggtccggattgccgcggaacaacgccaaagcgcacccccgcgccaggcgctcatccgggaaccgtgccaatacgatgttcgccaaggactcgcccaaatgtgccttcgcgttcatttcctcctcgctcagcttgtcgagacgcttctgcatacggcgtgtgagacgctgtatgtccgcctcggacgtactgtaaagcgtgccgtccgtcgcgtagtcgtcatcaagtccccgtgagaattcatcgaatccgttcatgaacgcgattatcggcaatgacagcagaccgaaccggacgagcgtctccgtaagcagttccagctgctcgacacctcggtcgaaccgcttgcggtctcgccgctcgaatccgaggataaggtcatgggccatcacgtcgcccatcagcgagtatgccagatcgttcaggaacgccacatcctgccatagtggttcgcccggcacatcccgattgtgttccagcgcgagcatgcggtcatcgacatctattggttcatcgtcccacatcttctcgtatgcatcaatcagccggacgacatcgtacatgtatcgccgctcgcatttcagcagatccagcctatcctccatgtcgatgcgggcgcagctctcgcagtcgcacagcgactcgtcgcccacctcggcatatccgcgaacgccatctcgcttcgacgagcatccgcccgcgtcgcgatctgccgtcgcaatctctccgacagccggttcctcatcgtcatgacgacccatatactcactcatccactgattgccatgcagctcgtattccgcatcggcctgcgcccgccgctcgtgcagatagtcgaccacgcgccgataccgcatgtccggcgccgcaccgaagcgcaacacgtctccgtcctcgcgcagcatgcacatgccgatgccggggtacagcagcagcatccgggcgatgtcgaggctgcgccgctcatcggcaccccaattgagcagggtgtatgccgccagccggtgcatctgcgtcgaatgctcctccatggcgagcccgcgctgcttgcggttgccgaaccgcttcctgccgcgaggccgtcgcatcagttcctcgacggtcgtcatacgaatcagcgacggcatgtaatcggacgggtcgtcgcgaaacagagccagcgtggaatcgttcagcagctcgtacagccacaccgagatgccgtacttgcgcaccgtttcggagcagccgtgaagaaacctccggcactcgcccaccagccgcccgttgaatgacatcgccgccgcgcacaggttcgtcgtccaactgccgcacgcgaatacgtcgcgcgccagcgcgtacagccggtgatcccatggcgtgggcgtgccgtccctgtcatagtcttcgcacaccttgcgcatagtctccggagagacgagttcctcgaatcgccgctccaacttgttgatagcctgcagaaatccgatggtatccatcgagaatgatgtcgccatgatcgctccttttcgtatgcgccactgccgtcacggtccctccgcgtcctcgcgcataggcacaccatggcacacccaaggctcccggcgccacccaccctcgaaaatctgtggatatgtggataactcaccccttatccacagttgtccacattgccggcggaaccggcaagcccggccatcagaccggtgaaaccatacgaaaatgccagaatggaacaccacgcgcataaacaacatccactatcatggctagcggaagtcgatcacatgccgcaggccgtcgcaccagctcaggcatcaaagggaagagacaatgaacgaaaacaaacgcaccgtgacgattctcataccctgttacaacgaggaggagtcgctgccgatgctgttcgcccggctcaccacgctctctgagaacgcccagctggcaccggacgatgacgatcgcatcgactatcgcttcctgttcgtggacgacgggtcgaaggattcgacccgcgacgaaatccgcgagttcgccagcaaccgtcagcctacgtaaggtgcccgcgcggacacgcacagctgtgcccgcgcggccgtccgtggctacatgaatttcttcagatccaccggacagctcaggccatccttgatgctgctgagcttgtccagcacacctccattggaggagtcggtggagttcttgttctcgtcggcaggcttcgatgaggtcttgccggaggatttgccaccgtcggtgccgtcgctgccagttcccgcccactggtcctccaccgcatccggcacatcagcgccgcacgtgtcggtgaccttgccgttggtgcccgtgtagatgcccttctcgttgataatcggcgtggtgacgacgtccagcgtcgacttcgccttctccgccgcccgcacggtgaacgcgatggtcaccgtctcacccggcttgatgccctgggtcagacgcaggttgatgaactggcggtcctccacggtgccgttcgacaccatttcgccggcttcgtaggcgagcgacgtgatcgcgccgccttcgggcgccatcaggaacagtcgcggctgcatcgtgcccttctccgtattgccggtaatgaacgccggcaatgacttcgcctgctcctcggtcatcgtgttcttcaaccgtaccgtcaccgtgtattcgtcgccgagaccggcgctcgcgatggtcatggggttggtggctcgggcgggcgcatccacttcgtcgctgatgcggtacgagttcgcggcgaaatcgctgccgcacgtcttcttgacggtgatgctcggctcaagataccagctgagcttgctgggcttcgcctcggtcacgtagacgccggccttcggctgttccacactgccgggaatcatgcccgcgacgttcgcgtcgaagaccttggtctgtacgagcgccgccagctcctcctcctgcgccatccacagcttgaaatggccgttcgcggacgtctgccgcagcgccttgagcatcggcgacagcgtcgacgtgcccacgcccgagaacacgtgggtcatgatcgtcttcgatgccttgttggtgtaggcgttctgctccttgtagatcgggtggtccacgtacagctcgttgaggaagaacttgaccgtgttcgtgccgtccaacaccttgccgtcactgagcttgaccgatcccgtcgcaccgatcagcgactgcaggaacacggggtcaagcgcgaacacaccggcgatctcctggttctcgttgcccggctgcgcgagccacatgttcttcaatgtgaccgcagcccgctggaagttcgggttgacggtggtcgtctgtgggtatttccacacctggtcgccgaacaccgcagcttccttgacgttctcggcatcgtacggctgcgtgccgtaggtgatgtcggtggtggcgatgaagtcgccgatcgtgaccttgccgtggtcggcggtcaccggcgcgatgttgccgaccatgccgccgccggaccgcagctcggccggattgtagatcgcgaccagatacgtgcgctcaccgttctcgcccagcagctgtggcagcaggttgatcagctcgtcgtattcgttgagcatcttgtccacggatttcaggccggagacgccggtcttcaccatggaggcgatgctcgagctcttcggaggcgccagcttctccagccgctgcgtctcgactttgatgtcggctcgggcctgcttgacgatgcccggcatggccgtcaccgcgctcaggtcgacggatttgtctttcatggagaagccggacagctgcttgctcaggtccatcaaatcggtgaacggcccgtccaccaggtttcccatggcgtccagcatcgtgcgcgcggcggtgatgtcgttcccgtacgccgtatggtcgcgcaggaacgtccactgcgacttgtccagttcgtcgcgcagcgcccgcgtggacgtcaccatctcacgtgcggacgtgccgatgttacctccgccaccgcagccgagcgcggtgttggcgaggttttcggaagcggagatgaagcggttcgcctccgtgtacagtttgagcgcggagattccgtagatgccgacgaccgacaacacggctcccagtagcacgaacaccacatacagcacgatgcgccgcggacgcagcgcttgagacaggaattgatgtccttttcgtccgatgtgctggggggatcggcgcatgggttaacctcgtttgcttcgtgttacattccgttttgtcgcgtccgtcgttccacgcgacgaccgttatcgttccgtcgggttcgatggtctgccgtcacaccgtcttttcgggcggaccggctctcgacgctacgtaatacaacctcagatgataccgtgcgatgcttaccgcacgctaagtcttctttctgaaccgttgtatttcgacgtttttttcaccattgcccgggaccggaaggatggcccggcacaacacccgcgaccttgtcagactgctttcagacttcattgaggggtataacagtatggagcaagataacatacacatagcgcgaccatagtgttgcctacgggatgccgtgctttacggggcctttcggggttcttcgggtggcgtcccggccactgtcacgaaaacgcgggcgcacggttgccatgatcgcagcccccgctgggaagaactggagaagtacacgcatgttcgttctcaagaacgcatggtcatccatagtccgccgcaaatggcgcacgctgttgaccatgttcatcgccatcatcgtcacattcgggacattgttcggtttctccgtcctgcacgccgatgaatcggccaccgatggctacaacccccagctggtcagcgccgtcatccgcccggatgcgaagaccaaggcaacctacaacggcgccgattcttcctatacgaagaactacctggcgttcgacgcatacgacaactacgcgtctgcgctgcaggccgccggcctgacgtacagctatgcgctcaccatcaccgtgccggtgcggcagagcggcgacgtcaaggccatcgccggcaccgacgaccagagcgccgacaagaccggcggcgagatgctgtaccgcagcttctcttcgctggaggccgcgcatgagaacgagctcggccggtacaagatcgtcaagggcaagcaactggactactcgagccagtcgaagacaggcgtgctgatttcacaggcgttcgcgaagaagaacggcctggacgtaggcgacaagttcaccgtcgcgttcccgaacgacgcgaagaagaccatcgagcagaccgtccgcggcatttacgagtacacggagccggccgccgcggggcagggttcggacgccaagctcgccaaggacaaccgcgacaacgtcatctacaccgcgtactacaccttcgcgatggacggcctgtatgcggccgacggcaaaggctggctgattcccgacctgaacatctcgttcctgctcgacagcatgtcgacctatcggaagttcgagaaggtcatcaagaaggcaaagctgcccgcgaaccatgagctcacctcgccgacgctaatcgagcacgagaagcagatcgcgccgctgcactccctggcgagctcgatgaagcctatgctcgccgccctctggattgtgggcgcggtgctgttgctgctttcgtggggatcgagcctgctggtcggccgtcggcgtgaaatcggcaaccagatcgtcatcggcgtctcgcgtgggcgtatcgcctggcagttcatgctggagacgctgttgctgaaccttgtcggattcgccgtaggcatggtcgtcggcgcgttcgcggtcaagccgctggccacgaagctcgccgacggcaatgcggtcagtgtgccgggcaacctgatctggactgtcatctggagcggtctcggcacgattgtggttctgatggtgatcgccatgatccgtgtgctgctgttccgtgtcaggacgctgtttgcagcccgttcctcgaatgaggtcgcggtcgtggatgacggcgggacggacgacaccgcaacaagcgacaacgcagcgaacgacagtgatacggcagacgccgacgatacggcggaatcggcacaggagcaggcatgaacgacacgaacacgaataaggcggacgacatgaacgaggacgacgtcacactgaccggtcccgaaggcgagaacacggcggtcgaatcagacgcggcagccgacgccacggccgacacggcaaccgaatccccggatgccgccggagcgagcgattcgacgacggtaccggacagcgtgcagttctccatcgtcttcgacgacgacggtgacgactccgacgccatcgtgatcgacgctgccgacgcggaaatcgacactaccgcggaagccgatacgacggtcgcgacggatggctccgccgaggaggcaccggtcgacgacgagaagcccggagatgatacgcaggatgccgccgcgcaggagccggccagtgccgacaacactgccgataacaccagtgccgataccggcgatgctgataccggcgccacggcggcgggcaccgccgacgagaacttggacgtggcagcggccaacgccagcaaggtcaacgaaacgctcaagctgagcaccgggggcaagacggccggtgatagccagaagaagaccagggccggcagggtcaccgtggcatcggccagcgtcgaccctgcaatgcgcctgtcatcgcgcatcgacaaggagctcaagcgcagcaaggcggacagcatccgtctcaagtcctacccgacgttctcgatgaacaaggtcacagtgaccgacaagaagtccggccgtcacgtgctcgaccgcatgacccaggcgttctatgccgggcatgtgtactcggtgctgctgcccgacaacgaccgcatgctgcacgagaccctgatgggcgtgatgagcggcatcatccggccgcatgacggcaatgtgatgaacaaaagcgcgaacctgctggagcttgagcccggcgaagtccgtggacatcgactgggactggtgccgcagcagtatgcggtacgagacgacatgagcgccgaacgcaacctggtgtatgcgatggatgcctccgggcgcacgttcctcaagccgaagccggtgatcgcacgcgagctgctgcacaaggtccatttcgatgtggataccccgaacgctccggttggcaagctggacgtggtggagcagcgtcgcgtggcgatcgcgcgcgccatcgcctgcgaggccgaggtgctgatcgccgacgagcccacgggcgggctgaacgatgacgacagcgtggagatcctgcagctgctcacgtcgctcacccacggcgaccccaagcgctgcgtgatcatcctcaccgaatcagaagccgttgccaacatagccgaaaccatcatcaagctataaacggcctcatctgatacgccctcgctgggtgggcagtccaccgggctgtccacccagcgagggcgtattgattccacctagatcatgcgcatgtggaacctcgcggccagggccggcacgtcggggacgccgtactggtcgaccagatccagccagcgctgcttgttcgcctccccatagcgctccgcacgcttggcgtaggcttgcgcggtcaggaacttcggcggtatcgacttgctgttgtatttgtcggcgaccatcacgatttcctgttccagattgaccggcatgtaatcgaccggaggcagcggcaggttctgcgcgatgaccatctgctgggtcaggccgaccccagtatgattgcgcgcgaactgggcgatggactcgtccacgccctgctccagcaagtactcgtagccgagcaggccatgcaggatgtaacgtttcccgtcgaattgcagcggttcgccatcactgccgtcatgcttgagcacgcgatacgtgccgatgtcgtgcagcaggccgccgatcgtcgccagatgctcgtcgatcaggcgtttcggcacacggccaccggtgatgccgtccgacggcaggtcggcttgttcagctgccccggcggaatcgtcaagcgcgttgccgctgccctggcccagcttgttggtgaacagcgcgttctgatggcgggcgagctggcgggcgatggtcgccacgacaacgcaatgcgtgtgcaccaggtcataggcggcctgggaaggggcgattttcttgtgcagctcgtcaatctggtcgagtgtggggatataaccggtcatacggctcattgtagccatcgcgacacgccgataacatcacacaatcgcaaagtgcatttccgcagatcagccattttccggccttcatcataaacagcgacgtcgattgtgctgcgcaatccgggcgtgtcgcgccggtgaggaggaaaagaggagagcgttgcgagcaagttacagatgccgggtgccatcaatcgcccgatagacgcctctcagatggagcgcacgtggtattcgccggtacggttggacgccacgatcatctgatcgttcttcagcaccttccagccatcggactcgttctgctcgaagccggaactcgccacgaccacaccggacggcttgccgtcacagtcctgcacgtcacggtacctcatcacacggtaatcgtgagctttctcgcccttgccgtactcgtcgtaaatctcgacgatgcgcggcgacgtcttctcgcggccggcggcgcacaaagccacgagctggtcctggctttggatcatgcagttgtagctggacttggggtacgcctgacgcagctggcgtaccgcctgcgccacggcctcgtccagcgcgaagccgaacgcgatgtattcgaggatgaccgagaagaagatcgcggagtcggaacggccgccggtcgacaggaacgcaccctgattgatcgggtacgcacgattgagcacgatgttgatgccgcggtcgtcggagatgtcgccgttgtggatgaagctcagcccgttcgcgaagaacggctgctggttctccagaatcagcggcaggttggagctggcgagacgcaggtgccacaggccaccacgtgcggggtcgtccgcaaagtcacggaaaatcgggtcatggcgggcggccagtgtgctcttgtacagtttcgtgccggtctcgggcttgcgtacctcgccggcggcaaacggcagctcagtggggttcgacagcaacgcgacaccccaaccgtcattgtgaatctcgctgagatcacggaaatccgtcacctcgtgcatgcccaggacgtcgttgaggctcaggttgaatcccgatgtcgcgtatcccagtaatctgcacatgcttggtactgtatcgtgccgcggcggctgacaagcgggcgtggctataggagttccttatagcgtgcgcacggccgcgatgcgcatgcggtccggcacccggcagacacatgccgatacgaccaatacggccacacaaacggccgattgacaggcaagcgtcatcatcaggggaaactgccagaagaacaagcgtccacctgcccgctcgccaatcgcacaacagacgaacaggtatgaggcaggtgccgccgcgccaactctcagtccgcacaggcggccacatatcaccccgaagcagccaagtccgcccacagatagcgcctgcgcgaccccggccgtgccatataccggtatcatcaccgcacccagtgccatcattcccgcaatcaacaccagcaacgccgcacgatccatcagccacgtattcctgacggcagccacatcagccgcagacatgccaggcagcgaccacgcaatcatcgtcgcaggcacaagcgccgccaacgtcgcaagaggcagactcacgccggaaccgaccagcgcaggcaatccaaccgtcatggacgccaatggcagcgtaacaagctgcgcggccaaacacagtatcggcagctgggccatcctcgccgtcttcatgcaagccggcagcgttcgtcatccataattcagcgacctgataatcacgtgcctgcgtgtccaatatctcgcatccgttctgtgtggtgtcatacgtcagcagaccggacagcaggtacgaggcaatctcatcgccggacaactgttcactgtcttcagcgctgaacagccatgcagtatgatccgccggggattcggacaacttggcaggcgtcacatatccatttcgaccaagtttcccggacaagtcggcagccggctgaccggccaaacgcagaccgtgatgccatctcgccggtcacagacagtagaggtcgtccttgcgataaccggatatgcgccgaacggcagtaccagcgggacggctaccgcgacggtggcgcatagagcgactattgcgcagacggaacagccggcaacggtcctgtcatggctgcgccatccgacgaccatcgcccgtactgaggcggtggctggcgcaaatacgcggcacccaggccgtaacgcatgggcggtttgcctccgcagtccatcagtccatcaggagcgcacgcgagccggcagtgcggcccgtgtgcgtctactgcttagcgagtttcgccgaatcgtcgaccttcacggcatcatttttcgtcgcgtcgaccttcgcgcctcccttggcatctgcggctgcaggcttcgcagcgccgtccttcgcagcggcggccttctgcgccgagcccgcaggcttcgtcttgcttccgtccctcgccgcggacgcagccttcgtgctgcccgagccaccgttcttcgcggtcggtttcgcagccggccgttcttccggtttgctgacggtcacgatatcgttgacgcgcggcgtgcgcgaacgcaacgcgacgcgcttcagacgcggcggtcggcgagtggagatgaacagcggctgaacctcgaccaacgggttgaacggcgccaggccgaaccatttgatcggggagccggcgacgtgacgaatcgcgtacttggcctgcaacgacatcgcgcctcgcgtggagatcttggattccggcatcaggtccttgtgaatcagcacgtaacggatggtgccgatctccgggtcggcgtccaccttcgggtagacggacttctgctgcggcaggtcaccggaatccgacaggtcgtgcatgatctggtgcaggtacaccggaatagactgcgacaccttgaatcccagacggatacgcactcggaacaggtagctcgtgccgaaattctgcacggagtactcgcgcgtgaacggttcgtcggtggtctgcaccgacaccgcccaccacgcacgggcgcgcttgggatgatccgcgaagatcgagaagaagatgtccgtatccagtcgtcgcatatccgaatcgctggtcagatacacgatgttgtcggcgaaatacgggatgcggaagtcgccgtgcaggcggtcaagcgccggcaggaagtccttcggcatcatgtggcggcgctgcgcgcgttccagacgcgtgccctcgttccacgtgtacatgatgaacaggatcgccaacgtcagcagcatcgtgaaccagccgccgtgcaggaacttcgccatcgacgcgatgaagaacatcagctggatggcgaggaacacgatggtgaacacgaccgccagcacccgcttgcggtcgtaccacatgtacaccgccagcaggatcgtggtagtgatcatcgtgatcgtcagcgcaaggccgtaagccgccgaaatatgctcggaatcccggaatatgcccagcacgatgagcgtggccacgcacagtacccagttgatgacgggaatgtacagctggccgcgggtgcgcgccggataccgcacctgaagatgaggcatccaattgaggccggtcgcctctgacaccatcgtgaacgcgccggtgatcagcgcctgcgaggcgatgatgccggccgtgaccgacaggatgacggccacatagcgcacgttcggatccatcatctggaagaacgggttcagtccctccatgtgctggtactcgggattgttctggttcttgaggatccacgcgccctgaccgaagtagttgaacaccagggcgaccttgatgaacggccacgtgaagtagatgttgccgcgtcccacgtgtcccatgtcggagtacagcgcctcggcgccggtggtcgacaggaacacggtgcccatgacggcgatgccggccgcgttgtgcgggctgaacaggaatttcacgccgtacacggggttgagcgccgcgagcacggaccaatcgccggagaggttcaccgcgccgaccacggcgaggaacgtgaaccacaccagcaccacggagccgaacacgcggccgatgctttcggtgccgcgcgattgcacggagaacagcacgacgatgatgaccacggtgatcatcagcgtcaggttgccgttttccttgaacagcgcctccaatggcggcagcgtcttcagaccttcgaccgcggagctgatcgacacggccggggtgagcacggaatcggcgaggaacgccgcgccgccgagcatggcggggatggcgagccatgcgccatgccggcgaatcagcgaatacagggcgaagatgccgccttcgcccttgttgtcgatacgcatggcgatgagcacgtatttgacggtggtgatcagcgttatcgaccagaacaccagcgacagcatgccgagcacggcctcacggtcggtgttggcgatgccgccctggccggaaaggaacgtctgcgcggtgtacaggggcgatgttccgatgtcgccgtagaccacgccgagcgcgacgatggccatgccgagcgagatcttgttggggccggactgcaatctgcgccaccagcggccgatcgcgcccttgcttgcggtcttggcgagtttttccgcttccttggtttctgccgcctgctgctttgcaagctcttcgcgctcctctttcgtcagtgtgcgacgggagactttcgggacgttggtgaacgtgtcggcacgtaacaacgtttcatcgggcttttgagccatgatgcttcctccatcgacggggataatccgcacatgatatccgcatattctaggtacagctactaacggaaaccttggtatttcaaattcaagcggtcagtatatgccccttttcggttttttccaacttggggaggacgccggacgcccttgccgcccctcgtcacaccccgtataccgtgcgtgtcgtgcgccgcgtcgcacgcgcgacttcggcgacgggcaggtcgaacacgtcggcgagcgccgtcagcgtgtacgggatcatgtacggcgcgttggtgcgcccgcggtatggcatcggcgtaagatacggcgcgtccgtctcgaccatgatgtggtccagtccgaccagccgggctgattcgcggataccgtcgttgcccttgtagctgaccgtgccggagaagctcaggtaccagccgttgtcgcgcgcgatctcgcccatttcggcgccgccggagtagctgtggaacacggttcgctctgggctgccgtctgcgagcagcgtctcgatgacctcccggtgcgagtcgcggtcgtggatctgcatgggcaggttcagctccttggcgagcgcgatatgctcgcggaaggcgtctcgctgcagttccttcgcgccttccccggtgcgaaacaggtccatgccggtctcgccgatggcgaccacctgatgcgggtatgcgagggccaggcgatgcacttcggcgagcgcgtcgtcgaagctcacgtcatggtggggcttgtatttcagcgacagaccgtccggtccggggacgccgcggtgaccgtggagcacggcttcattggggtggattgcgatggcggcatgaacggagtcgggatggtcgacggccatctggatggcggtcatgaggttcggcagctcgcacccgcagtcgatgatgccggtgacgccgactgccgcggcttgggcgagcagctgctccacgtcgtacaccggtacttccggctgtcctttttcgacggcttcgtggctcatggcccgcgcaaacggaatgacggatgccacatgcgtatggttgtcgatgacgtgcgcgtcgtcgggcagcggcgacggcgcgggcgcccagctgcggtcacgatgatgatgcttgctcatgtctcaccagtgtagcgagcggcacggcattgctgcgcggccgttcatgggtctcgcctcgccggctaccgccagcagttctcgtagggcagaccggtcagtcgttccaccacatgacgggtttcgggcgtgacgtcggccttgtcgccgccgttgcgcaggcgggtgatctctgtcaatacgatgccgtccgtacgcttgttgatggcgagatgggcggacacaatccagcagatgaccatcgcgacggcaagacggtaaaccagcccagcagcacggctcccaatccaatgcccgccaccgtcgtctgccatgcgcgcgtcgcgtcgaagccgaccgcgcccagcaccaggccggcggcaatcgtcgctattcccgagcccagctgacggaacgatgcctgaatgccggagaacgtggcggaacggtaccggcgagtcacgatctggtcgatgtccgcgatgtacgggaacaccgtccaccacggttccggcagcgtgccgaccagcatccacgccgcgaacagccaggccgtaccaagccagccgatgaaattgatcgcgtacagccgtttcgggcctatcttggtcatcgcccagccgaacaccggcatcagcgacgcgaacgccgccgtatggttccagtcgtgcaccacgaagaacacgaacgtctggccgaacacgtccatcgtcacctgcaccagaaggtagatggccagatgcttgcggagctccttgacgcgcagcgtgctcgcatactcgcgcaacaccagccgtgcacgccgcagccagcccgccatgccgacgtgcccgtcacgcttctcgccccacgcgtgcgcgccgaatccggcagtctcaggcgtcatctcccaggtacaccgccagcaggcgaacacgtatatgccgaacggcatccccggaatccacaggaacacccccagcgggatcatcggcgatatcatcatcagcagcagacggcgtacggccacctgccccagctgggcgcgcggaatgcggatcgaggtgatcggcggcgtgaccaccggggcgatcagcgtgttgtcgaatccgatcaccgacacgtcaccgggcacgttcacgccgtcggcggtgaaccgcagcacgatgcccaccgcgatcagatcgttgtaggtgatgatggcggtggtgtccccgccctccaatgcgagctcggcctgatagccgccctcgactgtggggtgcaccgggcctatctgattgaccttgaatcccatgcggttcccgatgtcatgcaccgcggccacctcgactgattggcccatgacgcggccgggccggcgacgtacgtgaccgcgagcgtttcagcaggctcagcgcgcacggtgccgatgcgcggatcgggcacaacgctggccacgccttcgagaggacggttcagcacgaccagcggcacgcgcttcgcatagtcgcggatgaaactgatgccgggcgcgtcggtggacaggatgacgccgttcaccttgtcggcgagatggtcgagcatctgctgtgtgcgctgcccggacgaccccgtttcgatgacgctcaccgcgctgtccgattccatggccgtgacctgcgcccctttgaggatctgcgacgagacgccgtcggcagtgtccttgaccaccagcgcgatgatgctgccggggaggccccgaacggggagaacggaggcggtgcgctcgcactgccgaccggcacagacgaccgcgaggccaaggccgcctacacgttcgcgcacggcgacggcgtgaaggtgaatcttgcgcaggagggcattcctccgctgaaatcgacgctcggcgacccgcggcccagaccgatgatttcttcggagggcagaagccccacgccgtcatcgcccaggcgttcaaggacgtgcgcaccgacttcacgtatctgtcgtacacggcgtacgcgaactcgatcgccgtggattccatcggccagtcataccacggcaaactcaccttgcacgaggccctgcagcagtggggcgaatcgctcaagaaatatggagaagagtaaggcttcaccgtacggtaggccgggtgccgacccgaacaatgaaaggaacatcatgcaactgttgtggtcgcgccgcccgcacgatcgaaatcccttcataatccgccgtgcgcggcagtccgacatccagcccctgatgcgacacgcccggattgcttcgcacaattgaagcacggcattccggagaatggcggaatgccgcgaccctgtgaacgcagatagacgattgtgctacgcaatccgggcgtgtcgcgtcaggggttggatgaaaggccctcacgctcctatccgataggcgcaaccacacaccggaaaagaagaacccggcggggaagccgccgggtgagagaagagagagaagaaggggttcaattatggggtttcaacaacctcgccaacgttgtaacaaccgctgacatgttctatataaccgcatcatgcttggaggaatgatgcacgttcctcggaattatctgtgagatgtgtgcccgacttgtgagcatgtagtcacatcccggcacaatgtacggaaaaccggccaataggcacggaacatggccgttcttcaccggtaacaaccctccgtcactttgcggcgggctgagcaaacggcagagctgtttgtagacgaaggcgatccgacaggcgcgcaagtgggctgcggccgaaggccgtccccaattgcagggcccgaatggctgtcgcgtagcgactgggggtggtcaccggtcgtcgcaatcatcctctgcggacccacccgcatccacatcctccccaactgccgcagccgggttcgatggcagcagcgaccacgcgtacgacacctgatactcataatcgctgccgcgccgatgctcgctcagccgcaggtattcgtccagcaggccattgatacgctgctgcacgtccatgagctcgtcacgggtcagcagcagcgtcccggtggtcatcggcgtgaaggggaattgccgacgtctctcagcgaggggtatggccgcgccagcttccatgacaccgttgatgcgcatgcgcagcgccttgagcaccccgtccatgaccctcatgcgcatggcggagtcacgttgctcgctaacggccatgctgaaggattccgcggcgggcgcgaacgactgtttggcaccagagggtgccacatcggtcaggtcgacttgctcgccggccgtgaaaccggtaccggtggcggccgacgcagccggtacttgcatgatgccggtcatcgcaacacatgcgatagccgccaaagcgcggcgtcacttcctcgcatggctgtcagttgcgcatgatatacgaaaaatatttcctattttctaccgttgctcacgcatcggacgaaaaatccccctgacattcatatgtcagggggattacaacaaagcctcaacagtcaacggcccttgtcagcgcctagatttcactgcttgagttcggcttgggccgcggcgaaccgctcagcctcggccttcttgcgggcggcgagctcggtgtcgaagcgggtgagctcctcggccacagcctcaggcggaattttcgcgaaaatcggatgcggcttcggcaccggagtgccggccaccagacgctcgctctcccacgggtgcacggtctcaccgagcttgtagtcgccggtgatgatcgggtacgtgaagcccggcttgtcgaggtcttcgacctcttcaaggcgcggcagcggcgagaatacgcctgagccgcccagcgcctcgtagaccttctgcgacgcgtgcggcaggaacggcgccagaaggtggttcgcgtcgtacaccgcctgcgctgccacatgcagcaccgtgcccagacgagcctcgtcgtccttgatcttccacggctcctcggcggagatgtacttgttgatgtcgccgaccacgcgcatcgcggcgaccagcgcgttcttctggtgatgcttctcgatcagcgcgccgatctcgtcgaacgcgtccgaggtctccttgagcagcgcacggtcctcgttggtcatcgagtcctcgtcgagcgccgggatctcgccgaagttcttgttgatcaggttggcgacgcgattgaccagattgccccagctcgcggccagctcctcgttgttgtggcgtacgaactcggcccacgtgaagtcggcgtcggaggtctccggtccggcgatcgagatgtagtagcgcacagcgtccacggggtagcgagcgaggatgtccttgacgtagatgacgatgccgcgcgacgagctgaacttcttgccctccatcgtcatgaactcgctggccaccacctgctcgggcaggttcagcgggccgagttcaccggtctctccgcccttggaacccttgccgttgtaggcaagcatctcggagggccagatctgggagtggaaggtgatgttgtccttgcccatgaagtagtaggccgggcagctcgggtcgttccaccactcgcgccacttctccgggtcgccttggcggcgggcccattcgatggaggccgacaggtagccgatcaccgcgtcgaaccacacgtacaacttcttgttcggattgtcgatccatcccgccaccggcacggggatgccccagtcgatgtcgcgcgtgatggcgcggggcttgacttccttgaacaggccgatggagaagttgatgacgttggtgcgccagcccttgcgggtcttgagccacgcgaggttcgcctcggcgagcgccggcaggtcgaggaagaagtgttcggtctcctcgaagcgcggggtttcgccgttgatcttggagacggggttgatcagctcgtcggggtcgagctcgttgccgcaggcgtcgcactggtcgccgcgggcgccgtcggcgtggcagatcgggcattcgccctcgatgtagcggtccggcagcgtgcgtccggtggacggcgagatcgcgaccttctgcgtgcccttatagatgtatccgttctgcaggcactgcttgaacagctcctgcaccacatgctcatggttgccggtggtggtgcgggtgaacaggtcgtagctcaggccgaggtcgcacaggtccttggcgatcacgcggttgtagcggttcgcgagctcctgggcggtcagtccctccttctccgcctcgacgagaatcggggtgccgtgctcgtcggtgccggacaccatcagcacgtcgttgcccttcatacgctcatatcgggcgtagacgtccgagggcacgccgaaaccggcgacatgcccgatgtgacgggggccgttcgcgtacggccaagcgacatttaccaaaacatgactcataaatcccgattatccggctcagcggggacaccgcggcgtatccacagcattatccacaatgcggcgtcgcggaacgtgagttatgcacatatccacagatttcgccgggtcggtggcggaccgccgcatcgtatggttatggtcggcgtatgaacagaatactgccttcggatatcagatatggagtcgcgccggcgcccgaccagacggatgtcgctgaagcggcaaaagtcggcaagccgcagcccaacgcgacacagcccgacacagggccgcccagcgcaacgcgacccactgcggcggcgccaagcaagactcagcccggcgcaacgcggcccggcacggagtcagccggcacaatcagccacagcgacaacgccgtcgcaatcgtttccgacctcatcgcgcgcggcaccatgccgcgtatcgacaccacgccactgctcacccacaaggaccttcccggtccgctcagcatggctcggctgacgcatttcggcaccctgcactcgctcgaccaaaccaacgcatacagcgccgagcacgccgacaccctgtacggccgcgcgatgatcgcgctgaaactcatcccgttcgggacgatcgcatgcgcgctcaccgccgcgtgggtatggctcggcggcacgttcccgcgcacggtcgatgtcatatccagctcccattaccgggcggattcgcacggacggaagattcgcgtcttcaaccgcaagacggctcccgagcacgtcatacaggtcgggaacctgcgcatcaccacgccgatgcgcacagcctgcgacatcgcgctgctgacgccgggagagctgaacgagcacgacgcgtgcgacgtgctgtgcgccttgttcgaggagtatcaggtcagtcttgcgcagtgcatgcagacgctcgatgacaaccatttctggccgaacacccaaccggccagggaactgttcacatcaatgaagcatttcttctgattgcaagcggtcgcggggccgcatcggcctcccgtccgactcaaccatcgacacggctcaccgccacgacacatcagcacgacgcatcagcacgacgaaaggagagccacatgcgaatgccatcacaggagaagacattgcagcgactgcagaatcccgcggagacgctgtgcgagcgtccccgcgcggggacggccaggcgacggcttcggcacagtcaagccagacgagccaaacgcaagagcattcccggcagacggatgcatgctctgcaacgacgtgaacaggcgacggcgtcacggcggtcaacgcgggcggctcctccccctccgccgctcagactctccccgctgctggcgtgcgatcccgcgaccgcgccggaagtgctctggttcatcgccgagcatgagccggaactgcggcgctggctggtcgccaatcccagcgcggacgccgcacttctggaatacgtcgcgcaggcgggcggccccggcgtcaaccgcgccctgaccatcctgctcgacggcctgccggcggcataagtcaggatttcattgccagaacggccgtatacacctgcttgcggttcggcaacgagccatccggcagcggatgttcggcgaccacctgcgcgatcgcgtctttgatgcgcacgccatcctccagggcacggtcgatggccagcacggccagatcgtcgatgctcaacgtcgccggcgcggccgcctccgcctcctcatccgacgcgccgccaatcaccagcaccatctcgccgcgcggcggattgtcaacgacgccttggcgtatcgtgccgaccatgccgcgacgaatctcctcataatccttcgtcagctcgcggcacaacgccatcgcgcggttcgggccgaacgcatcgagcaggtcatccatcgaatccgcgatgcgatggggcgtctcgtagaacacgatcgtgcggcgctcggactgcagcatgcgcagatgctgcacgcgttcggagtgcttgcgcggcaggaacccctcataacagaaccggtcggtcggcaggccggagagcgcgagcgcgtcgagcacggcgctcggtccgggcgcgcacgtgaccggcagcccacgctcgatggcccggcgcacgatcgccagtccgggatcgttgatggtcggcatgcccgcgtcggataccaccagcacggtggcgccggtctccacacggtcgagcagcccgtcggccttggctcgctcgttgtggtcgtgataggcgatgaccgtgccgttcacgtgcacgccgagtcggttcgcgaggtcatacagtcgccgcgtgtcctcggccgcgacgatgtcggcgtccgccagcagcgccttcaatcggtcggaggcgtcgcccacattgccgatcggcgtggcggcgagcacaacggtgccgctcggcaccatgaccgtccgcggggcggccttcggctcggtggcttccggtacagtggcgtccggcgaggcgccctccggcacgacttgcgaatcatcttgcacagtatccatggttcccagtatcccgcacgccaagtacctgacgaccacccgttgcgtccctaagtgcgcgccgaaacgacaagtgcgcgaacataagaacgcaaatgaccctgtttgcgtacctaagtgcgcacggtcgtcgtttcagcgcgcacttaagaacgcaaaaccgcctatccgcaccgctatataccgcgtctcccctgttacgcccccgctggtatggttcttagagttttcttaatggaattacaccattgatagtgacgggaattttcatgggtttcgttcatttcatcgtcaatttgctgaaggaccctcgcggcgcaatcgccagctggattgccatgggcaccgcgcctgcactcggcttcatctttctcatcgtattcattgagacgggcgtggtgttcttcccgttcctccccggcgactcgctgctgttcgcagccggcttcttcgccgcgcagggcgacagcgggctgccgttgatggcactgctgcccatagtgtggattgctccgatcctgggcgatcagagcaactacttcatcggacacttcttcggacgccgaatcatcgcgtcaggcaaggtgaaggccatgacgccggaacggctggcgaaaaccgagaagatgatcgagaaatgggggccactggcggtgttcctcgggcgtttcttcccattcatccgcacgttcatgccgttcatctccggtatttccggcatgcgctggagccggttcaccccgttctcggtgctgggcggcctgtgctggtccacgctgttcacactgctgggattcttcttcggcaacatccccgtcgtgcagaagcatttcgaattggtcatcgtgctgattctgctggtgtcgctgctgccgaccatcatcggactgctcaaggcgaaattcggcaagaagcccggtaccgcggcgaactcatcgagtgtggcggccggcacgcagaacaagtaacgcgaccggccactcctgttggccgcccggcctgcctgattacgttccgttgcgtcactgggtgagggctcacccagtgacgcaccccacgcacagtgacgcatatcagcccataaccggcacccaattttcacacacgccggcttgcatttggacatgggtcgtattaatgtgtattgagttgtcctgcgaagcaaggcaacatccaaggggctgtagctcagttggtagagcgcttcgttcgcatcgaagaggtcgtggtttcgattaccatcagctccacgaaggccgattccattccaccgggatcggcctttttcatttttcgcccccgatgaccatacgcccccgctggcgggggctgccgagcacagcgagactggggggggtctggagccgatacggtaaagaccgcccccatggtaaagaccacccccagtcggctttcagtcgacatccccgccagcgggaggaagattcagcgaccgctggtggttcaggagccgaggcgctggcggatgaaggcattcagcgcttcggcggtgatgccggcgaagccgtcgatggaggcgcattgtggaccgtcggctttggcgttgcggttgaagccgagctgggcaatggtcgtggctccggacgcgacagccgaggcgatgcccgtggccgagtcctccaaagcgacgcacctcgcgatgccggggagtgccgcggcgccatcggctccggccacgcccgtttcgatgccgagcatcttcgccgccgccagatatggagccggatcgggcttatgcggcaggtcatcgtcaccgcagacgaatccggcgaacgcgccggccggcgcatgatcaatcacgttctgagcgagcctgcgcggcgacgtcgtgaccagcacggagggaatcccggcatcgaccagcgaccccagcacgtccagtacgccattcgtccaaggcaccctctcgaactccttcttggcgacgtaatcgaccatcgccttggcaatctgctcgggcggcagattcgtcccgtgctcgatcatcgttttcgcgcaatggtcaagcggagtgccagaacaggaccacgccagatcctcatcccaatacccgccatgcgccgcggcgatctccatctcgccctcgtgccagtagggttccgaatcgatcaacgtaccgtccagatcccagaacacagccttcaacaacatgtcgctcatgcacaaccccaccttgtattgacgccaactgtatgcctgcatgcccagcaaccgggctttcgttttcattatcccagatgacctcgaagagggcgcctgattcttgacgtccattacacgctcatgactcagcaacgaccatacttcgaccgaggcaacccgcaatcagcgcaaacgaaagcgggccgctggcaggatttccgccaacggccctcaagaccagtcaaccgattcggtacgggctgcggcaatcagtcgaaatcgaaacgaaccgttgactgccgccgcccagtcgagagacttaccgattcgcgcgacggcgcagcgacagcgtcacaccgcctgccgcgagcagcaccgccactgcggcaagaagaccgaacacatccgcaccggttttcgccacagcgtccggggtcggcttctgcacgtcgccggtaccggcaccagtgccgtcaccgtccggcttttcgctcgggtctggagtgggatcgggatccggcccgggctccggctcctcgacagccgccagcgtcgccgtatatgtcacggtcacggcgtccgcgccctccggcacgttcgccgaaccgaccacttcataccggtgcgccgccgtatcgtttacggtcacgtcgatgccatccgcaagcacatccgcgggcttgaggccgtccgcgaccagggtccgcccgccgtcctcgccgatctcgtagacggcgtagctgtcggcgaccaccagcgaagccgccgcaccgatctgcatggtgtcgatgtgcgccctgtcggtgccctcgacgcgcccgaccggcagctcgccaccgttttcactcgctccgaccaaagtaacattggcggtgtcgtacggcagcgacgcgatgcggctgcctgacacgttgctcgggtacaggtcgagcgagcgcatcatgaatcgcgcgtaaccgagatgcccggcgtagttgagctggccggccttgttgaaccacgcggtcttgacgctcgcgtcagcggcgacgaccttgccgatccacgcctgcgcgtcgatgagcggcaaatcgtcttccttggccaccgtgcgcatagcgccggcatactcgtcttccccgccgcgcacggtgaccggcgtcaccagcacgaccttggcgcccgcctccttcgccttggcggccacggagcgaatatgcccggcgaacgcggcggcgtcgctttccgcaagattcccgtcagcgtcatacaggtccggagccaagaagaggatgtccggcgaatactcgtccaccatcgcagcgtagtcctcgtccatctgcttggcagttagaccgccctgcccggccgccacgaagaacttggcacgctgcagttcgcggtccgtggcgctcagcccggtgacgtattcccagcgcacgcgctcgtcgagcagctgcacgatgttcttggcaatcagatgatccgtatacccaccttcgatggtctcgccacccacgaacacgatatttttgcgagcaccagtatcggagatgatcggctgcaacgcgttcaccgccgcatcgaccttcgtcaccgccacggcactggtttcggcgctgattcgcttggcttccgcatcggtcagtgtgcggctccatgcggcgacgtaatcgacaatgccggtgagctgctgcgcgccgccggcgctgtcggccccgcggatcgcgccggccgtggccgtgttcaccgtgatcgcgcccggcacgttcagctgagtgcccgcgccgccgctgatcgcgcgcatcgcggctccgtcaacatagatcgtgaagccgttcgccacgaagttcacggacaccgtatgccatgcgccatccgcgaggtcgttcgtgccgaccgtgtagaagtcgccggtgttgccggagttgaggaactgcaccagaccggtcgcgctcaggcgcacggtcgcgcgggtcgcggagtcggagtcgcccagcgagaacagcgtctgcggctgtccggtcgccgacgcacggaaccggatggtcacgttggactcccgcttgccggccacagcgctcaccacatcgccgcccaggtcaacgtactgtgcgccggagaggaacttgcccacggacttggccgcggccggggcgggttcaagcccgtccgagcccttcagcccgttgccgtcggcgtccaccgtcacggtcggcttgtccagtgtcgtgccggagctgctccaccgggcgagcgggtcgtcgttggcgatcatattgagcgctcccagcgtgaacttggcccattcgatgtgcccgttctcgccggggtggatgtcgttgccggcacccatatacgtgccggattcgcggttgccgccgccgagttccagccactgcttgttgaagtccaccagcagcacgttcttgtcgagcgcgagtcgacgttccgcgtcaaagtacgtgtcgaggttggcgttgaacgtcgtgttggtcgtgtagttctgcgtctgcagcaccgggatggcgccgaggtcgcggatcttgtcaatcagtgtggacaggttggcggtgtactggtcgacggtgaacgcctggcctgtacgcccgtcgttcatgccgaacgtgaggaacacgacgtcggggtgcttgtcagacacccatttctcgaatgcgccgtccttgagcggccaactggcgtccgcgctggagatgccggtgttcatgaccacatcgttggcgcgggatacaccacgcaccgacgcggtgtccagatggttcgcgaacagttccgaataggtgcgatagccacgcgtgaactgcacgccgtgcgtgatggagtcgccggtgaacagccagttgatgcggtcggtctttgcgagcttttcggagagcgtctgccagtcgtcgagcgcctcgttgcgggtcttccatgcggcgatgtccgccggcagttcgaccggctggctcacggtgacgggatcgccggtgatggacaccgattcgagcaccgtctcgccgctcgtgtcggcggtggcgtcgatggtcgcactcggcgtgaacgagccggccgtcgcgtccgcttccgtcaccgtgtggtaggcgagccgcttgccgttgccactgacgcatgcaccggtcgttcccggatccaacctgctccaccggcatacgggtgcggggttgctcgccgactgcggggtcgtcacgccgtccagattggattcgcgcggatagaccgcgaatgactgcgtgccgacgttctcataggtgatccggtaggtcagcgtgtcaccgaccttgaccgggtctccgttgtcatcggtacgttcgatggtgagtttgagccgcttggctgcgggatccgggtcagtgacagtcaccgccaactcgccttcggcgaagctgtgcagcgtgtcttcggactgcgcgtacttgccggtgatcttcatcgtcgctttcgcgacggtaccactgacagccgccgcaggcacagtcaccggaacgttcacggtcgcgctctgaccggcggcaagattgccgacgttcacggcttcggcgctccaaccagacggcagacctatgggggtcacggtgacgttcgtgtagtcggtcagaccgtcgttggtgacggtgaccggcgcggtcagcgtcccctcgccttccttgacggtcgcggtgccgctcgccgtggcggtgagatatcccagccattccatcgacgcgcgcgtgtaggtaatgctttcgccttcgtacagcagaccgtaaccaccgccggcggcgtcgttcagcgcggtgatgaccgagtaggccatcgagcctgccttgaacagcttgccggccgaccatgtggtgccatcatcgaatgaaacacgcacgacaccgttcgcacggccctcgttgttcgcgcgcggtgacgagtacagcagcaccttcgccttcgccgaaccttccggagcgttcgggaacgcgcgcgtgatctgcgcgttgttgttcggatccggcagctgggtctccgacttgatcggaccatagttcacgccgccgtccttcgaaatcgcaacgcgacggtaaccggaaccgcccgggcgggagttgagcatcacgcgaccgtcggacagctccacgaccttgttctcgtccatgttcacttcggtcacggggttgccggccttccaagtcttgccatggtcgtcggaatacacggacaccgcgatgttcgtgttgctcgtggtgcgcacagcgtattgctgtatcaaacggcccttgtactgcccgtacttgagctggatgccatggccggaggatgcgaaacgggacttccactcgccttcgtgacccttggtgatgtctttggtgatgttgcgcggctcgctccatgttgcgccgttgtcgtcggattccatgacgacggcctgcagcacgttgcgcgcatcttccacacccaatacggagccaaagtagccctgatcgtacgatttcacgcagaacaggaagatcttgccggcttcctcgtcgaccacataggacgggtcggagtagccgtatttgttggtggcgctgcgtccctgcgccacgtatgccagcgtctcccatgacttgccgccgtccttggagatgcgctgcacgatcgagttcgggttgggcgcgtccgccgccgatttcggccgcaaatcccatgcggcgagaatccagccgttgggtgcctgcgcgatggcggggatgcggtagtaatcggtgtcaccgatctgcttgttggtcgccagcaggagcggttcgccgtctttgcgctccgtcggcgtggacgcggcgtcgtcggccggccccgcgacggtcaccgtgccggtggtgaacgtcatgtcatcttgcagcacctgcgtgccgtcgcgatccgatgtggcgcggaatgtggctgtcggcgtgtatctgcgggccacgacgtcctcagcggtgatgacgtgataggcgaacccacatgatgcggtccggttggcctccactccggatcggcagctgtttctcggataggacaccacgtccacgcgttcgatgttcgactcgctcgggtaggcataaatcttctgcgcggttttgttggtgtaggtgaagttgaaggtcagccggtcgccgatcttcacattatcgccgagcgtatcggtacgctgcatggcgacgcgcagtgcggaggtcgcagggacggccggcaccgtctcgccggtgatgtcgacgctttgcagaacgccattggtgccgtcctgagtggtcgccgacacggtcgcggtgggcgtgaagccgtttgcgacatcgtcttcggtcaccacatggtaggcgaactccttgctcgcgctccaagtgcatgcagccgaagcacccgccgcgagattcccccaccggcacatgggattggggttgcgcgccgactgcggcgtggcgacattgttgaggttcgacgccgtgggatacacaatgaaaccggtatcggaaacgtttttgtagccgagactgtaggtgagcttgtcgccgacttcggccggggtgccgttgctgtcggtgcgggtcagggtgagttgcagatattcttggggtgtttcgtccgccgcatttgcgctgatggtgccagccggcagcactgccagcatggcgatggccaccagcagcccgctgagcttgcgcatcagcgtttttgccgtggcacgtcggaatattgtggtcatatcgagtctttcttctctgcggcaggtcagcttccgaaccgatacgggggtagcagcgtcttcttcggcgcagtcggcttctttaccgcatattatttatgaactatcggttatatgagaatcacagcgatacgctgaaatttccctcattgtagtctacagagtgaacgaattacaacatgaaaaagcccccgtgtttcgggggcttttcctgtatgccgtcactcatcggccggacggtttaccgccgcagcagtgaggtctcggtcagatcagtgagcggagcggcggcgcagcgacaacgccgcgacaccggacagcgccaacaagacgaacacgatggacatgcctgccgtggaagcgccggtcttggacaggccgggcttctcggtgggcacgtcgaccttcggtccggccggcttctccggttcgggcttgggttcgggctttggctcaggatcggcgctcttctcggccacgtcgatggcgaacgaggcagtcaacggatccgcaccctccacaggcacactcaccgtgaccgtcaccacaccagccgccgcgaacggctcagccaaatcgaccgccttgccgtcagcatccacagccgacagcgaatactcgccggcagccaacgccttcgacgaaccatcactcatcgccgcggtcaccgacaccttcgacgcatcaaacacgtcaccgaccttcacaccagcctgcgacgtcaccgccgaaacacccgtgatggtcggctccggctcaggatcgggctcgctcttttcggtgacgttcaccgtgatggagccgtcaaagccggtcgtggcgttggcattcgcagcggacgtgccggtcacgcgcaggacgatcttggcgacatcgtccttcttggcagttgcgggaacattcaccgtgacggtcacgtccttggacgcgccgccggcaagagcgcccacgttcaccggagaggcagaccagccggtcggcagatcggccggagtcaccgtcacgccggtgtaatccacagaaccgacgttgctcaccggaacggtcacgtccaccgtgctggcaccctcttcaaccgaagcggtcacgtcgtctgcggtggcggacaggtagccgagccaatccatggaaatgtgcgtgtacatgatgtcgtggctgtcaatgccgccgccggtgacccaagcgccttcgtacagcagaccataaccaccgccagcggcaccgctcagcgcggtgatgaccgagtaggccatcgagccttccttgtacagctttccggatgaccacgtggtaccgtcatcgagcgagatgcggaccacgccgttcgcacggccctcgttgttcgcgcgcggtgacgagtacagcagcaccttcgccttcgccgaaccctcgggagcgttcgggaacgcgcgcgtaatatgcgcgttgttgttcggatccggcagctgcgtctcatttttgaccgtaccgtagttcacgccgccgtccttcgaaatcgccacgcgacggtaaccggaaccgttacccgggcgggagttgagcatcacacggccatcagacagctccacgaccttgttctcatccatcagcatgcccgtcaccgggttgccggcctgccaggtcttgccatggtcgtcggagtacacggataccgcggcgttcgaaccggtcgtacggcccacggcatactgctgaatcagacgacccttgtacttgccgtacttgagctggatgccggcaccggaggtggcgaaacgggacttccactcgttctcgtaacccttggtgatgtcagcggtgatgtcacgcggcttgctccacgtctcgccgttgtcctttgagctgacgacgaccgcatgcagcacattgcggttgctctcatcgacgccaagctgagagtcggcgaagcccttgttgtacgagtgaacgaagaacaggaagatctcgccggtctccttatcgaccacataggatgggtcggaatagccgtagcgttccggggcgttcttgccctgcgcgacatattggatcggcgtccacgacttgccgccatccttggagatgcgctgcacgatggagttcggctgcggggcatcccagcacttgacgccgctgccgttggccatcgccgtattgggacgttggtcgaatgcggcgaggatccagccgttgggcgcctcggcgagcgccggaatacggtagcattcggtaccgaggttctggcgggcggtggccaggcgcacggcctcgccatcggcacggtctgtggggatggtggccggatcggggcgcttgccttccttcacggtgacggtatcgccggtggagacgatgttgtcttgcagcacctgagtgccccctcggtcagaggtggccttccacacggtacgcggggtgaagctgccggccgtgagatcatccgcagtgatggtgtggctggccgtggagcaagggtaggaagcgcctcccgcaaggttctcataacggcagttcggcgttcctgtggtcagcacaccgctcagattcgactcggcggggaatgcggtgaatgccgaactcgtgttgttggtgttggtgaaactgtaggtgagcgtgtcaccgacatatacctcgtcgccgagggtgtcggtacgcgtcatcgtgacggtgagcatgtcagcatcatcgctggccgcactcgcggtggatacccctgcgggcagtaccaccagcatggcagcggccgccaccagcgcgccaagacggcgcagcagcgatggcttggtcgaacgaaccatgtgtgttcctctcctgtgcaacgccgggtcacgactttgggccccgaccgccgttccacatatgggacggcatggcttcctcaccatcgagcgttatttgtatagtatcttgctattcaatcttcattggcatagcaaaatcgctgtcgggtacagtattatagcctacattgtgaacaaaatgacatacaattgtctgcgattccgtatcatcccccccccacttcccatccagcacccgcccaaagtcccatccgacaggaataaaacgggacgatggcgggatacaagacgtccccatacgacaaaagtcccatccagcggatgccagatgggactatgacgggatgacggccgcctattcgcgaccggatgtgatctgcaacggcgcgatatatgcgcacccgcgccgacgcacatgatagaacggcgactgccgcacctcgacgacttcaccatccataccggcctcgaacacgctatcgccgtccagtcgacggcgaagatgccgaatctgccggcgcagctgcctgttctcctcctgcaacgaaagaatatgcgtgacgcctgcgagattgataccctcgtcctggctcaactgctgcgcctgcgcaagacgcgccacgtcacgaagcgtgtagcgccgcgcaccaccctccgtgcgctgaggcaccaccagaccaaggcggtcgtactgacgcaacgtctgtggatgcacgcccgcaatctgagccgcctgactcaccgtgaacaccggcatctccacgtttaagccgagcgcgtcgattgcatcgagatcaacgccgccggagaccaacgccgcggcgcaagcagcatacgcacgcctgacttcctgtgcgattcgcgccatgatcatcatctccttaacgttgattatcggctgcggggtgatggtgcccccagtcgctccgcgacgatgcgagatgccgccgggaggattaccgctcggcggcaaccgcttcgacgtagccctcgacggacttgtcgaattccttcgcggcgtgcttcgcgcccagacccggcttcgcgggcacgcgaatctgcacgcacccaatcaggtcgccggcagtggcggactgaacgcccttgccgctgacacgaatctccgcgccactggacgagcccgccggcaccttgaacgtgacggtctcgccatcgatgtcatgcgcttccacgcgggcaccggccacagcctcgcctacggtcaccggcacatccatgacgatgtcatggccgcgcatcgtgaaccgcggatccggcttcacctgcacggtcagatacatgtcgccgttcgcgccgccgttgctgcccggcttgcccttgcctgcgatacgaatcttctgcccgtccttgaccccggcgggaatatgcgtcttgaactgcttgccgtccacgcgcagcgacacggtagcgcccttgaccgcctgacggaacgtcaacgtgatcttggacttgcggtcatcgccgcgctgcggagtcggcggctcctcatacgggttaccgtaacgcgaaccgccatagctcgcaccgccacggccaccggcagccccgccgaacatcgagaagatatcgttgagattgctcggaccgccgccggacgtgctgaagcgcacattgccgccgttgccgccgaacatcgaaccgaagatatccgagaatccggaagcgtcgaacccgccctgaccggagccgccagagaaacgcgccccacccatgccgaactggcggatcgcgtcgtacttctgccgctgctccttgttgctgagcacgtcgtacgcctcggagatgtccttgaacttctcctcggcctccttcgtcttgttcaggtcgggatggtatttgcgcgccagcttgcggtacgctttggtgatgtcatcctcggtggcgtccttggagacaccgaggactttgtagaaatccttgctcagccattcattctcagccattcaggtctcctttcgtgtatgcgtgtatgtgtgtcgtatgttgttttttttgttgttgcgtattggtgttcgtcaccgcggaggtcggcatgtttgctgtgaccggagcggagacgacggtgatgtgatcgtgtctgcggtcaacgcgcgaccgtgcggagttttgtcgcttggggtagcggacgcttggggcggtgcggagaccgtagaccgtgcggagcgggcgggcatgttgtccgacttcgctccaggccgctcgggccgaggtttacggtcggacaacatgcccgcccgctccgcactcgttaggtgcagtgacttgcgtcgcatctccgagtcgggtgcatgttttgcgcgagtgtggtatcgcacgcttgctgcgatgacagcgagatgagacaggtggtttgcggaaatctgagggtagtcggatttccgcaaactcctcttgggggggggttagttttgcggggaggctactacgacgcgggcggcgcggatcacgcggtcaccgatgcggtagccggcttccacgaccgtgtcgacggtctccttctcggcctcggcgtccggcttgtgcaggatcgcctcatgcttggttgggtcgaattcctcgcctttttcgccgaacttctccacgccgaacttctcgaacgccttgtcgatcttcgcggccacggccttgaaggagtcgtccatctcgctgtgttcgcggatgcgatcaatgtcgtcgagcgccggcagcaacgcggtcagcacgtcgatgatgccatgctggcggaaacgctcctgctcgcgctgcgcacgattgcggtagttgacgaactcggcgcgttcacgctgcaacgcttcgagatagtcggcggcttccttcttggccttgcccagcggggtcagcgagtcgtcggcggccgctccgtcatccgcacccgcggcagcggagtcaccggtcttatcggaagggcccgcttcggcggacgccttgtccccagccgagccggcagcgcccttatcagcagacgcatccgcagacttggccgagtccgatgccttgccggcagaaccggcggcagcgccgtcggaaggaccggcctgcccggtggcggacaggttgtccgcgtcaggcaggtcgttcaggtaatcgtccttgttgaactcggacatgattacttgttgtccttcttgtcgtcatcgtccacgacctcggcgtccaccacgtcgtcatcgccaccgttggaggcggcacccgacgcaccggcagccgcaccggcagcatcagcagcgcccgcagcaccctgctgcgcgtacagtgcctcgccgatcttctgcgcggaagtcatgagctcgctctgcgcgctcttgatcttctcgatgtcctcgcccttcagggcttccttcagggcgttcaccttgtcggtgacttccttggcgatctcgtcggagatcttatccttgttgtcgttgaccagcttctcggtctggtaggcgaatgcctcggcctggttgcgggtctcggcgtcctccttgcgcttcttgtcctcggcctcgtgggcttcggcctccttgaccatgcggtcgatctcgtccttcggcaggcccgagccaccggtgatggtcatcgactgctccttgccggtgcccttgtccttggcggacacgtgcacgatgccgttggcgtcgatgtcgaaggtgacctcgatctgcgggatgccacgcggagccggcgcgatgccagtcagctcgaaggtgcccagcggcttgttgtcgcgagcgaactcacgctcgccctggtagacctgaatcagcacggacggctggttgtcttccgcggtggagaacacctcggagcgcttggtcggaatggcggtgttgcggtcgatgagcttggtcatgatgccgcccttggtctcgatgccgaggctcagcggggtcacgtcgatcagcaggacgtccttgcggtcgcccttgatgacgccggactgcacagcggcgccgacggccacgacctcatccgggttcacggactggttcgcttccttgccgccggtaagctccttgacgagctccttgacggccggcatacgggtggagccaccgaccagcaccacgtggtcgatgtcgctcacggagatgttggcatcgcgcagcacgttgttgaacggcgtgcggcagcggcccagcaggtcggaggtcatttcctcgaagtgcgcacgggtcagggtctcatccaggtgcaccggggtgccgtcgggcgtcatggccaggtactgcatgttgatggaggtcgaagtggacgaagacagttccttcttcgcctgctccgcggcttccttcagacgctgcagcgcgatcttgtccttggacaggtcgacgccgtacttgttcttgacctcgccgacgagccagtcgatgaccttctgatcccagtcgtcgccgcccaggtggttgtcgccgttggtggccttcacctgaatggtggagaagccgtcgtcgtccttgccgatctccagcagggacacatcgaaggtgccgccgccgagatcgaagaccaggatgcgctcgtcttccttgcccttctcaagaccgtaggccagcgcggccgcggtcggctcgttgatgatgcgcaggacgttcaggcctgcgatcttgccggcgtccttggtggcctgacgctgggcgtcgttgaagtatgccgggcaggtgatgacggcatcggtgacgggctcgccgaggtacgcctcggcgtccctcttcagcttcatcaggatctgcgctgagatctcctgaggcgtccacttcttgccgtcgatctcgacggtccagtcggtgcccatgtgacgcttcacggagctgatggtgcgatcgacgttggtcacggcctgacgcttggcgacctcgccgaccaggatctcgccggacttactgaacgccaccacggacggcgtggtgcgcgcgccttcggcgttcacgatgacggtgggctcgccaccttcaagggtcgcgatgcaggaattcgtagtacccagatcaataccaactgcacgtgccataatgtgtactccttaaatatcttgttcgtttacgtttgcttgctcaagtcttggccccgcggccatcggtgctcgatcgacgcccacgggtcttcgcctcaaggttgccctcgttttgccttccaaaacttgagcctacaccactcaactttcgagcaccagcttttattcccacttcttcacaaaaacttgagtcgatatcactcaagtccgctctcaaaactcgcagatacaccgatttcttagcgaaaaagccgccgtatctgcgagttctgagagcccccaaatgcaaagagccggccgcaaccatcacaggttgcagccggctggcgtatcagttgccctaggcgacgtcacgaatcgcggcgagcgtcagctcagcggcgacccgccttgacggagcgcacgaccatcgcgccggcgcccagagcgagcaccatcagcgccaggccgagcacggtcgcgccggtcttgcccagaggaacggtcggctccttgacggtgccctgagcgacagtgccgctgccgttgccgccgttcggcgtcttgtcggcggagcctgaggcggacgggaagctcacggaggcggacttgccagactggcggccgttcaccgtcagcgtgtaggacgcgccctcggccggagtgaagtcggcgaacgagatcgaggtggtggccgcggtggcgacgcgcacgccggagagcggggtggacgtgttggactcggcgacgaccttcttggaggcgttgtcgatcagctggtacgacagcaccgcgtcaccgttgaagccggtgacggccgcgctgtacttgccgtccttgtccttgttcacggtgaccttgccgccgttggacaggttgttctgcgacgtggtgtcggtcgccaggccaagggcgccggcgatcgtgtagaagttatcggtctggtcggtcaggccatccacgcgggacgcaccgggacccgatgcggcgatgcgcagctgggtgccggtgtggctcatgttgccctgggccttgctggaatcggccgcaccttcggtgtcttggccgtcggagtacaggttcttctcggaggtgccgtaggagatggtggtcttggagccgtcggcgttcttcagcacggtgctcagcgcgtagtacggctgggattcgacgatctgcgaggtgtgggcgtggtcggcggtcacgatgatgagggtgtcgctcaggtcgaccttcttgagggcggcggagatggccttgtcaaggtcgtcggtctcgccgatctggccgcaggcgttggcgttgtggtcctgcttgtcgatggaagcgccttcgacctgcaggaagaagcccttctcggacttcgggttggcctgcagcaggtcgagcgccttgtcggtgaagtcggcgagggacgcgccctgattgccgagccacttggcgttggtggtgcacacggtcgggttctcgtccttggcggcgtcctgcttggtggccacagacgggttgaactgggtcggcaggttgccgtcgccgagcagggcgagcaccggctggccatccttgtaggtcaggttcttgaagccgtcgacgtcaccgctcttgacggtctggaaaccgcggtcagcggcctgctgccacagggtgttgccgttctcgtcgagctggttgaagtacttggcgccgccgccgatggtcacgtcggcgcgcgtgtcgagcagctgctcggagatggagccgatgccaccgttggccttgagctggtcggcgaggcacctgccgatgccggcgagctcggcgtctttgatgtcgaccttgccgtcgccgttcttgtcggtgccgtcccacttgccctgcgggccgtagcaggcgcgctcggaggagtgggattcctggaccgccggagtggcatcctggatctcggaggtggtcacgttgccggtggcgaggccgttggccttggcgagctcaatgaggttgagctgcgggttgcccttgacgtccacggacacggcgttgttgtaggtcttggtgccggtcgcccagccggagccggaggcggaggagtcggtgaccggggtgatcacgccggcggtcttggaaccggtgagctggcccttggaatccttggccatcagcgaatcgttggagctgccgcccagcgagaacgtggtgtactggccgacgccgctttcggcggccttgccggtcgaggtctggagtgcgcccggctggccgatcttgtcgaggccctggaacgtgccgttgacgccgtgcaggtagttgcgtgcgacggtgatctcggaatctcccatgccgtcgccgatgaacaggatgacgttcttcgccttcgcgttgccgatcgtggcgatgcgctgggcgccgccgtgcaccgacagggcgtccacgcccttgccgttcagatcgtaggtgccgctcgcggcgaacgccggagcggtcagcgcgcccagggccgcagctgaggtcaacgccgcgacggcgcctttgagcattttgttgatgttcatggatctcttcttccaatcacgaagccgggcatgccccggcggtcaatcaccggcgccgtcgggcacagcaagcctctctcggcagcgccggaaggcctcgcggccctcaccgagcaaactatgtcggccattcaaccgtcacgcgacgagtatccgaacgtaacgtgaacttccgcggtcattttccgtaaccgagagaacggttttcattttcaaagagccttacacacacccctttctctttgagaacgtttgcagtataatgaaacgaatatgatgtcggcagtcacggcacgatggggaattcaacacacagcaaaggagttgtctacatggataaagcaggaatacgcgaagtggcaaaagcggcaggggtctccatatccaccgtatcccgcgcattcgcccaccccgaagtcgtgtcggagaagacacggcacaaggtgctgcaggccgcggaccagctcgacttcaacatctcccgctcggccgcggccctgaaatccgggcagacgttccgcgtggcgctgctcatgaacgaggagatcaccagctggttcaacacccagatcttcgccggcatcaactcgatcatgcacgacgccggctatgacatctccgtcttccagcacatcgacaccgccgacatgcgccgcaagttcttcaccgacctgccagtgcgacgcaacgtcgacgcggtgttcgtggcgtccttcgccatcgacgagaaagaggtcgaacagctcaagcgcatccgcgtgccgatcatcggcatcaacacgccgtccatcgacggattcgacgcctccatcagtatcgacgacgaaaacggcatgtacacggccacccagcatctgctcaacctcggccacaagcacatcgtgtacgcctgctcggcggcgtccgagtccatggactcctcgatcgacgcccgcggccgcggattcatccgcgcctgcgaaaacgtcgagaagaggcgtgaactcaactggcaggtggtcaccgtgccgcgcggacgcgcgttcgccgattcggcgctgtcggcgctgctcgcgctggacgagttccccgacgccatctgctgccagatagacatgatggcgatcccgctgatgctcaagctcgaacgctacggacaccgcacgccacgcgactactcgatcatcggcttcgacgacagcccctatgccgacaccgtcaacctcaccaccatgaaacaggacccgttcaagatgggacgttcggccgcccagaaggcaatcaggctcatcaacggagaggaacccgagaagccgcatgaaatcgtgcagccgaccctggtgctgcgcgagtcagacgccctgtacacggactgaacccgtttcagaccgccgcccgtttcagaccgccaaggcgcagaccaccagcgcgatcagaagtccgaatatgggattcatcacgctccaatcccaccatcggccggtcacgatcttgtcatacggggcctctgcggccaccgccgcgatcaacagccgcaacccgtaccgccacacgtcaccggtgtgccgccagttcttgcccgcattgttgtacttgtgacgccagtttgccgttgatgacggtgaggccttcggctccggcggcgtatgagccgtcgggtgtgttcgaggagctcagagtgatgttgccttcggcgtcgacgccggcggaggggttcctaccgacgtacatgccgcctcccacgtaggtggcgatgcctttgtccgggtctgcggtgtcccgctcttcaccgaatttctggtcggacggggcgcagagcgcgccattggcgagctgcgaggcgtccgcggcattcgccggcgacggtatgaggctgatgaaggccatggatgccatcatggcgacggccaccaacgcgacggagccgacgcgtgattgttctttgcgccgaggaacggccatccatgcgttcgcgctatatggcaagcgtgtcgcgagcacgcatatacctgccccatgccataggcaccaacaaaaatgccccgccggattgaacccggcagggcagatatcaaggcgaattcagaatgtcaacgattgcaccgttgccgttcccggcaccacgacgtcagcagttccagcgctcgatgacacggtcccccttgtatacggacagaatcgaataatgagcggtatccagacgcagcagacgcgcgaaatgcgggtcgacccccagccaacgtgccgtaaggatgcgcagcacatgcgcgtgcgcgacgaacagcacggaatggccgctctccatcagcggcaccgcctgatcgatggcctgctgcacacggtcatagacgtcgctcagcgactcgcccggcccgttatgcacgggaacctgctcgccgtccggcagcgtctccgtccagtcaccttccattgtggggctcagcgcatcggggccatcattccatagctcccaagagccgccgtgcaattgcgcgatggtctgacgggtacggccctccgcccggccgtaatcccattccgcgagcgccggcagcgtacgcggagcgaacccagcgaggcttgccgtctgctgggccctcttcagcgggctggcgtacacgcagttctcgccgaatccctgcggaaacgccgtctgaatccgggtgccggcatcgcgggcctgtcgctcgccttcggcggtaagaggaatatcggtgcgcccggtatgctgcccggactcactccacacagtctgcccgtgtcggagcagaaccagtcgccctgccgtagccgcgttgccacctgtcgtttgagtcatatgcagtactgtactcaacctgcagcatattcgcatgccgaggcctatacgcgatgcgtctccacctcgcaaaataatggtgacatgacagaatttcaggatggaccgggcaacggcggatcgggcctcgacggttcaagcaccgatcggatcatcgaaggcttcgcccgaatcaacgagaaagtggatgccatgcgtaatcagcgtctgaacgaccccgactccctcggcgataaggccgtcaaattcgcgctgccgtccatcgcggggttcgtggccggcaagctgttcactctggtgtggaacaagttcgtcgcccgcaagcgtccatccgatggcacgggcgagctgggggacggagtcgtggaccagcaggagagcctgttcatgagcatcctgttcgccgcattgtccgccgccgtgggagccgcggtctcgcaactctctgatcgcggctccaaagccctcgtcgctcgccgtcaccgtcgccaatccgactgataatcacttggcgtcgtccagcgcattgtcgccgtgcatcttctatgcgcatcagcccgttttgcgtctttaagtgcgcgccgaaacgacaagtgcgcgaacatagggacgcaaatggccctgtttgcgtccttaagtgcgcacggtcgtcgtttcgacgcgcacttaaagacgttttggggcgccagcattaccgacgtgttccccgtcagcgcaaatgggtggctcttggggcgtctctttgcgacaatgacagcatggttaccaacagcactatcgagacgctgctcaatcgctggtccatccgcaaattcgttgccgagcccttcgacgatgataccgtcgccacgctggagaccgtggcccagcacgccgcttccagccagtatctgaacgactggtcggctgtccgtgtcaaggatccggcgcttaagaagcgcatgtccgagatcggcaggcagccgtatatcgccgaagcaccgctgctgtatgtgttcgtcgcggacgagcaccgcaatgcgattatcgccgagtcgaagggcgtgtccacggattcggacacctacggtctcgccggtagctaccggttctctcaggcccagaacgatgcggttctggctttgcatgcgatggagaccgccgcctattcgctcggcctgggatgcgtcatcctcggttccctgctcaatgatgttcccggtctgatcgaagcgctgcacctgccccagtacacgtatcctgtgctgggattggcgatcggcaagcccgatcaggctcccgcgctcaagcctcgcatgcctcgcgagctgcagttcttcgatgacgtgtatccgtcggatgatgacgccattgaatccatcaaggagcgtatcggcgcctttgacgtttcagtgcatgagtactacgatctgcgcaacaccgatcgtcccgttgacgcattcagcgatcagatcgcctcgattgcagcccagcgcatggacgccgcgcatcaggtgataccgaacgccacatcgcagggattccgtctcgaccggtaaatgacccccaaacgataatgggcggtggtcggaacctgatatcgggttccggccaccgcccattgtgttatctgactcgtgttgttcggccctcgcggattcgcctattcagcgaatgacgggagaagagcatcaacgccaccgcggcttgtagcccttcttgcggctgtgcggttttatctgctggttcagggggacatacgtgtgctcatgagcgggatcacgatgcgtcagatgccaggtgccgcagtattcgcaccgatacacccacagctccgctccgcgttcgataaggctctggtcggcggcatgctgcgcctgggccttgtcatggtacatgatcttgttcgaggtggaacagcgtttcggagtgaaataatgcatagcaacaccacagtctaggacaggaattcttctgttgcaacggctgttggttgttgtgtttgggtatgggtggacccccgggggttgtttgcctcgtccgggggtccttgtcgtgtggtgcggcggcgtgctactctcccacaccctgtcgggtgcagtaccatcgccgtgccaggtcttagcttccgggttcggaatgggaccgggcgtctctcctgggccatggccgccgcaaatcttgggttatcggccgggaaacagggggtttcccgccggcgtgtggcggttcggggaccggacaatggacgcgattcgttgctgttgactgatcgtgcgcgtgtgaggaccgtgctccctgtgcgccttcgcggggccctgccgggtcctgcgccacacaccctcgcgggcgtgtggatgtgggttgcctctcgaccattagtaccggtcggctccacccctcgcggggcttccacgtccggcctatcgaccacgtgttctgcatggggtcttcagcggctcggggccgcatggaatccttatcttggagaaggcttcccgcttagatgctttcagcggttatcccttccgaacgtagccaaccggccgcgccactggcgtgacgaccggcataccagaggttcgtccacccaggtcctctcgtactatgggcaggcctcctcaagattccaacgagcgcagaggatagagaccaaactgtctcacgacgttctgaacccagctcgcgtgccgctttgatcggcgaacagccgaacccttgggacctgctccagccccaggatgcgacgagccgacatcgaggtgccaaaccatcccgtcgatatggactcttgggaatgatcagcctgttatccccggggtaccttttatccgttgagcgatgccgcgcccgtgcgccggcaccggatcactatctccgactttcgtccctgctcgatccgtcgatctcgcagtcaagcccgcttgtgcgattacactcgacacccgattgccaaccgggccgagcggacctttgagcgcctccgttactctttgggaggcaaccgccccagttgaactacccgccaggcactgtccctgaacaggatgactgttcgaggttagacatcaaacgagaacagagcggtatttcaccttgcggctccgcggatgctggcgcacccgcctcgaagcctcccgcctatgctacacaatccgcgcctaatgccaataccaaggtatagtaaaggtcccggggtcttttcgtccttctgcgcttaacgagcatctttactcgtactgcaatttcgccgagctcctggtcgagacagtggggaagtcgttacgccattcgtgcaggtcggaacttacccgacaaggaatttcgctaccttaggatggttatagttaccaccgccgtttaccggggcttgaattcaccgcttcgcagaaagctgacggatcctcttaaccttccggcaccgggcaggcgtcagagcgtatacagcggcttgcgccttcgcacgctcctgtgtttttggtaaacagtcgctaccccctggcctgtgccaccccccgccgctcatcaccgcagggggtctcccttatgccgaaggcacgggagcaatttgccgagttccttgaccaggattcgctcgatcgctttggtattctctacctgaccaccagtgtcggtttggggtacgggcggcaacgcgcctgacgccgaagcttttctcggcaccacggatcaccggattcgggccgtaaggcccccatcatcacgcctcgccccgacgccccgcggatttgcctgcgggacgggctcgaacgcttgaccacggaaaaccacctccgcggccggctgccctgatgcgtcactcctgcgctgacctactacgaggggggatcccaacgcgcccgcgccgcgaccccccgaaaggggagacggcacggacccggaggttagcgccccaggcctcggttgtttcggttcgctgccggtacgggaatatcagcccgttcatccattcgactacgcctgtcggcctcgccttaggacccgactcacccggggacgacgaacgtggccccggaacccttggtcatccagcgggcgggattcgcacccgcctctcgctactcatgtctgcattctcactccccaacggtccacggcaggcttgcgccgccgcttcgccccgatggggacgctctcctacccagcatccaaacggacgctgccgcgtcttcggtggcgtgcttgagccccgctacattgtcggcgcggaaccactagaccagtgagctgttacgcactctttcaagggtggctgcttctgagccaacctcctggctgtctatgcgactccacatcctttcccacttagcacgcgcttggggaccttagacgacgatctgggctgtctccctttcgacgacggagcttatcccccgccgactcactgccgggatacgcgtcacgggtattcggagtttggctgctgtcggtacccgatacgggccctcaagcatccagtagctctaccccccggacgtaatccccgacgctgcacctaaatgcatttcggagagaaccagctatcacggaatttgattggcctttcacccctaaccccaagtcatccccccggttttcaacccaggtgggttcggtcctccacgcggtcttacccgcgcttcaacctgctcagggctagatcatcccgcttcgggtccaggacacgcgactcaaacgccttttgagactcgccttcgctacgcgtaccccacacgggttacgctcgccacgtgccactgactcgcagactcatttttcgataggcacgccgtcaccccgaaaggctccgacggtttgtaagcgcacggtttcagagactgtttcactcccctcccggggtgcttttcacctttccctcacggtactagttcgctatcggtcagacaggtatatctaggcttaccccacggtcggggcggattcacacgggattccacgagtcccgcgctacttgggaaacacgatccggagacgacgcgcgttcggctacggggccatcaccctctgcggcccggcattcaatccggttcgcctcacacgccgttttatcactccggccgggcccgccaggacccggacacacgctccctcaacaccacgcgcgcaacggctggcgcctgtcacacgcgcgcggtttggcctgatccgctttcgctcgccactactcacggaacatcctttcctgcaggtactgagatgtttcacttccctgcgtaccccccgcgcgaacgcggtgccggcccatgacggccggcgggttcccccattcggaaatcctcggatcaaagccctgctggcggctccccgaggcatatcgcagcctcaaacgtccttcatcggtactgtctgccaaggcatccaccatacgcccttgcaagcaacccgcacgacccatccgggaacggcgggaaaccgcaagcccacggcaaaaactccgctggcaacacaaatcatcacacaaatgatcacacacaaaacgatcaaacaccagactccgaagagtccggcgaaatcaacagcagaagacaccccccaaaagggcgtcccctgctcgcgtccactatccagttctcaaaccaccacgcacccgcacgcgagcccacccaccccaccaggggacgggcgaccggcacggggcacggaacaccagccacgccaaacggcgcggggtggcggtccgggaacccaaaagcatgcccgcaccactcctggacgcaccgcacgaccggcacgcccgaaggccgactccactcttccacaccagcaacccccgcgcacccggcacatccggggcaagggggcacacaccggccaccagacagtggcctgaaatctccgtagaaaggaggtgatccagccgcaccttccggtacggctaccttgttacgacttagtcccaatcacgagcctcaccttagacggctccatcccacaaggggttaggccaccggcttcgggtgctgcccactttcatgacttgacgggcggtgtgtacaaggcccgggaacgcattcaccgcggcgttgctgatccgcgattactagcgactccgccttcacggagccgggttgcaggctccgatccgaactgagaccggttttcagggatccgctccatgtcgccatgtcgcatcccgctgtaccggccattgtagcatgcgtgaagccctggacgtaaggggcatgatgatctgacgtcatccccaccttcctccgagttaaccccggcggtcccccgtgagttcccaccataacgtgctggcaacacggggcgagggttgcgctcgttgcgggacttaacccaacatctcacgacacgagctgacgacgaccatgcaccacctgtgaacccgccccgaagggaaacgccatctctggcgtcgtcgggaacatgtcaagcccaggtaaggttcttcgcgttgcatcgaattaatccgcatgctccgccgcttgtgcgggcccccgtcaatttctttgagttttagccttgcggccgtactccccaggcgggacgcttaacgcgttagctccgacacggaacacgtggaacgtgccccacatccagcgtccaccgtttacggcgtggactaccagggtatctaatcctgttcgctccccacgctttcgctcctcagcgtcagtgacggcccagagacctgccttcgccatcggtgttcttcccgatatctacacattccaccgttacaccgggaattccagtctcccctaccgcactccagcccgcccgtacccggcgcagatccaccgttaagcgatggactttcacaccggacgcgacgagccgcctacgagccctttacgcccaataaatccggataacgcttgcgccctacgtattaccgcggctgctggcacgtagttagccggcgcttattcgaaaggtacactcacccgaaggcttgctcccaaacaaaagaggtttacaacccgaaggcctccatccctcacgcggcgtcgctgcatcaggcttgcgcccattgtgcaatattccccactgctgcctcccgtaggagtctgggccgtatctcagtcccaatgtggccggtcgccctctcaggccggctacccgtcgaagccttggtgagccgttacctcaccaacaagctgataggacgcgaccccatcccacgccgatagaatctttcccacaatcacatgcgatcatgtggaacatccggcattaccacccgtttccaggagctattccggagcatggggcaggtcggtcacgcattactcacccgttcgccactctcaccaccaagcaagcttgatggatcccgttcgacttgcatgtgttaagcacgccgccagcgttcatcctgagccagaatcgaaccctccacaaaaaaaacgaaagggaaccattgatgaccccaaaaattgacgcgacttcttaataaggaaaagaagtccgcacgaaaaaccccggcccccatcaagcgccctcgcgcacccacgggcaaacacccgcaggcgggaaccggactggcataaaatcaaccaaaaaagtagtacaaacacactcttgagttctcaaaccaccaccactcggccagctcagcaaccccagtgaagaagttcatcgctaaccggcagcgagtagataacttacacgagttggccgaccaacgcaaatcgacatgccccaagacacccaaaaccattgaaacaacaacattccatcggcgtgtcgaaaatggccttcaaacacaccctatgaccagaatacccctcctggcagggcggaaaaaactcatatttcattgttctcgggcgtgtcgcaaactattcagaccatgttcaccgaggtccggcagcgattcacggcacctatcgaagccatccacgacaaatcggaagacgtaacgccttcccggcgaccgcaggataccgggaagggcatgcggcggctcaccagttcgacacgatgatgcgataccgtcgagataacgacatgacgcggcaccgcgccgcgacgacactatgtgcaatggcactgaggttgcaatgacaccgggaggataaaatgcagcacattccgtgggacggcgacatggcggaatttcccgaaccgctgcgcaggtatctacgccctgggcatgtattcgacagcagctcgtccgccgaagcaaccgtatattattccgacatcggccagggatgctatatcaagaaggcccgtcacggcgcactgcggaacgaggcggcaatgacacggtattttcatgacaaaggactgtccgccgcggtgctgcattatggtcaggaccatgacggcaatgactggttggcgacggcatgtctgccaggtgacgactgcaccgcgtctctttacgtgagggagcccgaacgtttggccgccgtcctgggacgacggctgcgtatgctgcatgagcaagatccaaccggatgccctgtgtcgaaccgtacgaaagactatctggcggcagtagagcggaatcatgcgcagggatgtgcggaccgttccttcttcacgcgggtctacgggaacgccgacaccgaatcgatatatcgcctggtgcggcagcatggcgacgaattgcgtcacgatacgttgctgcatggtgattattgcctgccgaatgtcatacttgacgattggcggttcagcggtttcgttgatttggattgcgccggagtcggcgacagacatgtggatgtgtactgggctttgtggacgctatggttcaatttgcataccgatgcatacggcgaccgccttctggatgcctacggacgtgatctcatcgacatggagacactgcggctggtcgccgcctgtgaggtattcggataatccgttccgtgcatgagagcatccgatccggtcgcgcctggatacaggcgacagcgattggacgacgatacgcacagtgaaatacatggacgatgatgcataatgccgataacggacattatgttctctttggcttatgcgttgcagccattacattgagtacagtacgactccatcggcttccgtcctcgctgacggtagcccctgtgaagcggatgaggtgcgttgacctcatgcctgttggttgttgtgtttgggtatgggtggacccccgggggttgtttgcctcgtccgggggtccttgtcgtgtggtgcggcggcgtgctactctcccacaccctgtcgggtgcagtaccatcgccgtgccaggtcttagcttccgggttcggaatgggaccgggcgtctctcctgggccatggccgccgcaaatcttgggttatcggccgggaaacagggggtttcccgccggcgtgtggcggttcggggaccggacaatggacgcgattcgttgctgttgactgatcgtgcgcgtgtgaggaccgtgctccctgtgcgccttcgcggggccctgccgggtcctgcgccacacaccctcgcgggcgtgtggatgtgggttgcctctcgaccattagtaccggtcggctccacccctcgcggggcttccacgtccggcctatcgaccacgtgttctgcatggggtcttcagcggctcggggccgcatggaatccttatcttggagaaggcttcccgcttagatgctttcagcggttatcccttccgaacgtagccaaccggccgcgccactggcgtgacgaccggcataccagaggttcgtccacccaggtcctctcgtactatgggcaggcctcctcaagattccaacgagcgcagaggatagagaccaaactgtctcacgacgttctgaacccagctcgcgtgccgctttgatcggcgaacagccgaacccttgggacctgctccagccccaggatgcgacgagccgacatcgaggtgccaaaccatcccgtcgatatggactcttgggaatgatcagcctgttatccccggggtaccttttatccgttgagcgatgccgcgcccgtgcgccggcaccggatcactatctccgactttcgtccctgctcgatccgtcgatctcgcagtcaagcccgcttgtgcgattacactcgacacccgattgccaaccgggccgagcggacctttgagcgcctccgttactctttgggaggcaaccgccccagttgaactacccgccaggcactgtccctgaacaggatgactgttcgaggttagacatcaaacgagaacagagcggtatttcaccttgcggctccgcggatgctggcgcacccgcctcgaagcctcccgcctatgctacacaatccgcgcctaatgccaataccaaggtatagtaaaggtcccggggtcttttcgtccttctgcgcttaacgagcatctttactcgtactgcaatttcgccgagctcctggtcgagacagtggggaagtcgttacgccattcgtgcaggtcggaacttacccgacaaggaatttcgctaccttaggatggttatagttaccaccgccgtttaccggggcttgaattcaccgcttcgcagaaagctgacggatcctcttaaccttccggcaccgggcaggcgtcagagcgtatacagcggcttgcgccttcgcacgctcctgtgtttttggtaaacagtcgctaccccctggcctgtgccaccccccgccgctcatcaccgcagggggtctcccttatgccgaaggcacgggagcaatttgccgagttccttgaccaggattcgctcgatcgctttggtattctctacctgaccaccagtgtcggtttggggtacgggcggcaacgcgcctgacgccgaagcttttctcggcaccacggatcaccggattcgggccgtaaggcccccatcatcacgcctcgccccgacgccccgcggatttgcctgcgggacgggctcgaacgcttgaccacggaaaaccacctccgcggccggctgccctgatgcgtcactcctgcgctgacctactacgaggggggatcccaacgcgcccgcgccgcgaccccccgaaaggggagacggcacggacccggaggttagcgccccaggcctcggttgtttcggttcgctgccggtacgggaatatcagcccgttcatccattcgactacgcctgtcggcctcgccttaggacccgactcacccggggacgacgaacgtggccccggaacccttggtcatccagcgggcgggattcgcacccgcctctcgctactcatgtctgcattctcactccccaacggtccacggcaggcttgcgccgccgcttcgccccgatggggacgctctcctacccagcatccaaacggacgctgccgcgtcttcggtggcgtgcttgagccccgctacattgtcggcgcggaaccactagaccagtgagctgttacgcactctttcaagggtggctgcttctgagccaacctcctggctgtctatgcgactccacatcctttcccacttagcacgcgcttggggaccttagacgacgatctgggctgtctccctttcgacgacggagcttatcccccgccgactcactgccgggatacgcgtcacgggtattcggagtttggctgctgtcggtacccgatacgggccctcaagcatccagtagctctaccccccggacgtaatccccgacgctgcacctaaatgcatttcggagagaaccagctatcacggaatttgattggcctttcacccctaaccccaagtcatccccccggttttcaacccaggtgggttcggtcctccacgcggtcttacccgcgcttcaacctgctcagggctagatcatcccgcttcgggtccaggacacgcgactcaaacgccttttgagactcgccttcgctacgcgtaccccacacgggttacgctcgccacgtgccactgactcgcagactcatttttcgataggcacgccgtcaccccgaaaggctccgacggtttgtaagcgcacggtttcagagactgtttcactcccctcccggggtgcttttcacctttccctcacggtactagttcgctatcggtcagacaggtatatctaggcttaccccacggtcggggcggattcacacgggattccacgagtcccgcgctacttgggaaacacgatccggagacgacgcgcgttcggctacggggccatcaccctctgcggcccggcattcaatccggttcgcctcacacgccgttttatcactccggccgggcccgccaggacccggacacacgctccctcaacaccacgcgcgcaacggctggcgcctgtcacacgcgcgcggtttggcctgatccgctttcgctcgccactactcacggaacatcctttcctgcaggtactgagatgtttcacttccctgcgtaccccccgcgcgaacgcggtgccggcccatgacggccggcgggttcccccattcggaaatcctcggatcaaagccctgctggcggctccccgaggcatatcgcagcctcaaacgtccttcatcggtactgtctgccaaggcatccaccatacgcccttgcaagcaacccgcacgacccatccgggaacggcgggaaaccgcaagcccacggcaaaaactccgctggcaacacaaatcatcacacaaatgatcacacacaaaacgatcaaacaccagactccgaagagtccggcgaaatcaacagcagaagacacccccaaaagggcgtcccctgctcgcgtccactatccagttctcaaaccaccacgcacccgcacgcgagcccacccaccccaccaggggacgggcgaccggcacggggcacggaacaccagccacgccaaacggcgcggggtggcggtccgggaacccaaaagcatgcccgcaccactcctggacgcaccgcacgaccggcacgcccgaaggccgactccactcttccacaccagcaacccccgcgcacccggcacatccggggcaagggggcacacaccggccaccagacagtggcctgaaatctccgtagaaaggaggtgatccagccgcaccttccggtacggctaccttgttacgacttagtcccaatcacgagcctcaccttagacggctccatcccacaaggggttaggccaccggcttcgggtgctgcccactttcatgacttgacgggcggtgtgtacaaggcccgggaacgcattcaccgcggcgttgctgatccgcgattactagcgactccgccttcacggagccgggttgcaggctccgatccgaactgagaccggttttcagggatccgctccatgtcgccatgtcgcatcccgctgtaccggccattgtagcatgcgtgaagccctggacgtaaggggcatgatgatctgacgtcatccccaccttcctccgagttaaccccggcggtcccccgtgagttcccaccataacgtgctggcaacacggggcgagggttgcgctcgttgcgggacttaacccaacatctcacgacacgagctgacgacgaccatgcaccacctgtgaacccgccccgaagggaaacgccatctctggcgtcgtcgggaacatgtcaagcccaggtaaggttcttcgcgttgcatcgaattaatccgcatgctccgccgcttgtgcgggcccccgtcaatttctttgagttttagccttgcggccgtactccccaggcgggacgcttaacgcgttagctccgacacggaacacgtggaacgtgccccacatccagcgtccaccgtttacggcgtggactaccagggtatctaatcctgttcgctccccacgctttcgctcctcagcgtcagtgacggcccagagacctgccttcgccatcggtgttcttcccgatatctacacattccaccgttacaccgggaattccagtctcccctaccgcactccagcccgcccgtacccggcgcagatccaccgttaagcgatggactttcacaccggacgcgacgagccgcctacgagccctttacgcccaataaatccggataacgcttgcgccctacgtattaccgcggctgctggcacgtagttagccggcgcttattcgaaaggtacactcacccgaaggcttgctcccaaacaaaagaggtttacaacccgaaggcctccatccctcacgcggcgtcgctgcatcaggcttgcgcccattgtgcaatattccccactgctgcctcccgtaggagtctgggccgtatctcagtcccaatgtggccggtcgccctctcaggccggctacccgtcgaagccttggtgagccgttacctcaccaacaagctgataggacgcgaccccatcccacgccgatagaatctttcccacaatcacatgcgatcatgtggaacatccggcattaccacccgtttccaggagctattccggagcatggggcaggtcggtcacgcattactcacccgttcgccactctcaccaccaagcaagcttgatggatcccgttcgacttgcatgtgttaagcacgccgccagcgttcatcctgagccagaatcgaaccctccacaaaaaaaacgaaagggaaccattgatgaccccaaaaattgacgcgacttcttaataaggaaaagaagtccgcacgaaaaaccccggcccccatcaagcgccctcgcgcacccacgggcaaacacccgcaggcgggaaccggactggcataaaatcaaccaaaaaagtagtacaaacacactcttgagttctcaaaccaccaccactcggccagctcagcaaccccagtgaagaagttcatcgctaaccggcagcgagtagataacttacacgagttggccgaccaacgcaaatcgacatgccccaagacacccaaaaccattgaaacaacaacattccatcggcgtgtcgaaaatcgtcaaaatacgccttcaataccaacttcagaccgtctttcgtttccaaatcgttaggaaaacggtccttgtacggcgtgttgtgcaatgttccccacacagacggcggccattcacccaccgttcaacgccggaaggcagacacattcctgtggtaagcctgtaatcatgaaacacatcgcagtattgacgggcgccggcatctccacgtcggcgggcatccccgacttccgcggcccggatggcgtctggaccaaacaccccgagcagatgagcgtctatgacatcgacgccttcctgtccgataaggaggagcgcgaatactcctggcgctggcagaaggaatcaccggtatggaacgcgcagcccggagccgcgcacaaagcactggtcaaactggagaaagccggcatgctcacgctgctcgccacgcagaacttcgacgcactgcacgagaaggcgggcaacagcccggacgtcatcgtcaacctgcacggcaccatcggcacctcacactgtatgaaatgccacgcgaaatacgacaccgccgacatcatggcccgcctggacgaagagcccgacccgcattgccaccgcacgcttccctatagtggcggtatgccctgcaacggcctgatcaaaaccgatgtcgtctatttcggagaggccctgccggacggcgcaatggagaaatcctataagctggcctcgcgcgcggacgagctgtgggtcatcggttcgacgctggaagtatatccggcggcgagcatcgtgcccgtggccgcacaggcgggagtgccgatcaccatcatgaacatggggcgcacgcaatgcgaccgtctcgcgtcgcgtctgattcgcgacgacatcgcagttgcgctgccgaagctggtggacgagaccatctccgcggcacagtaacggcgcagtagcggcacggctatgcaacggccagccatgacggccggcttatacgcagcgggggcgcccggacgagatggtccgggcgcccccgcatgtcatcggcgtcaaagccgcaccgcttcatttcgcatctgcgaaagccggcggaaacccacggcgtcagtaaatgcgcttgggctggaagcctgcctccttcagcgccatgagaatatggtcgatgtgatccggaccattggtctcgacggtcacaccgagtgaaaccgcattcgtatagtggccggacgccttgaactggtcgtgatccagagcgataacgttcgcgcgttcacgagcaagcagctgcgccaccttgaccagctggccaggggtgtcaggcagctccacctcgaagttcatgatgcggccgcgggcaatcatacccttctgaatcaccgcacccatcgtcaccgtatcgatgttgccgcccgacatgatcggcacgaccacgtgcgggccggtcgcggaggcgaacttgcgcgaacgcaggttcaggtgttccaaagccgccagagataccgcgcccgcagcctcgatgaccagcttgtgcttctccagcatcagcaggatcatctcgttgatatcgcgttcggtgacggtgaccagatcgtccatgaactcgttgagcagggcgaacggcagatcgccggggtgcttgaccgcaacgccctcggcggacgtgacgacctgatcggcctcggtcacccgtccggcggcgaacgagttcttccatgccgggctgccttcggggatcgcgccaatcacgcgaacctcgggcttgaacgtcttgatggcgagcgccacgccggcgcccaggccaccgccgcccaacggcaccaccacgtcggtgacgttcggcacatcctccagaatctccaggccaatggtgccctgaccgcagatgacctcgtaatcgtcaaagggcggcacatagatcatgccttgcgtggaggccagttcggcggcatgggcggccgcctcgtcgaacacgtcgccgtacagcaccacatcggcgccgtacgccttggtggcgtccactttcagcgggggcgtaatctgcggcatgcagatcgtcgccttggcatgacgctcgcgcgccgcatacgcgacgccctgcgcatggttgccggcggacgcggtgacgatgccgcgggcgatctgctcctcggaaagcgacgcgatcttgttgtacgcgccacgaatcttgaacgaaccggtcacctgcaggttctccggcttgagcagaatctcatgcccggtcagctcagacagggtgcgagagggaatgatctcagtgtgacgcgcggtgcctttcaaacgcttggcggcgagcttcagctcggccgcgtggtcacgctgcaatgccttaaggacgtctttttgttccatactgcgtattgtatgcatcgccctgccgaacggacgcggccgtctcacctgcgattgccgcagtcgcggcgacccgtcggaggactggccggaaaacagttgcacgtattcataagtcggcttcgttgcgaggcttccttcgtcgccgggcgtctgatgtatgacggtctcgatggtagacgaaacgtaatttattgccacggtatcgcgtgtttcttgcgcaaggaaagaaataacccgcataccggtccggcaattatcgtcgtgaggcgaagaagccggtgagcagacgggcgcatgccgcttcgcgaacgccgccgacgacctgcggcacatgcccgacatgcggatcgcgggggatgtcccaaatcgaaccgcacgcccccagcttcgcgtcccaggccccgaagacgatgcgtccgatgtgcgtctggatgcacgccccggcgcacatcgggcatggctccaatgtcaccaccagcgtgcagtcggccagattccagtcgccgcgggcctgcgcggcctcacgcatcgcctcgatctcggcatgcgccaacggatcgtgccccgcctcgcgacggttgcgcccccggccgatcaccgtgcctcgctcgtcgagcaccacggcaccgaccggcacgtcaccctgcttcccggcgcgctctcccagcgcaatcgcctcgcacatcgcctcgtcaagttcgcccatgcgcccagtttatcgaaatcgcgctctcaaaacttgcagatacaaaatcagaaccgccattttccaatacatcgacttttgtatctgcgagttttgagagcgcgattcatgaacaaccaccaatcaggcaccatgccgatgccgtatattgaggcttatgggcgaagaagcagcacacgatacgacacgacgtctttccgacgtgattcccggacgattcggcgatccggtctcggtgcagtatgcctggatgtcacccgaaaacgccgaagcgatgccgacacggccgttgttcctcgcgctgcatggatggggatccaatgaacgcgacatcgccggaatcatgcagtacatcgccccctacaacgatgtggtgtcgctgcgagcgcctctggtcctgcacgcgccggaaggtgtatcggccggcgcatacagctggttccatgacgctgtgccttccggagacgacctggatcacgacatcgcggccgccgcacgcgcggtcgaccagtgggtcgacgaccacatccccgcgacgcgcgacgtcgtgccgatcgggttttcgcaaggcggggccgtcgcggtccatctgctgcgcatgcacccggaacgctatcgcgccgtcatcaacctgtcgggattcctcgcgcccgcaggcgtgcccggcaccgcgccggcggatgaccggctggccgacttcgagataccggtatatttcggatacggcaagaacgatgcggtcattcccaaatatgagctgttcgccgcggccgcgtggctggaagagcacacgtggctgacgacgaaaagctaccgcgggctggaccatgcggtgagcctggacgagttttcggatatccggcaatggcttgtattgcacgacatcgcgtccggcgtgctgtgacccgcgcgaacccatcggccgcgcccaccccgttcagatgctgctgtcggcgtccacactcatgacgaacacgttgcggcgcagggccttcgcctgggcgcgtgtgatgtcgcccgcctcgagcatgtcctggatgatgcccagctcgatgccgtagctctcgcgcttgatctcttccgcctgagcgatcgccttcgcgctgccgcccatgttcggccgtgacttcaacgcgccctcggcccggcgataatcgaggatcagcgccgagcagtgctccgtacggtaggtgccgcgtcccatctcctcatacagccgatccaccacgtgctccatcacgtcgagctgcagcagccgggagtgcgcgaacatctcgtcctcgctgatcagtggcgtggtacgccggatcttgctgctgatgcgccgtccgagattctccgcacggcgttcgaacgcgcgcatgcgcccgcgaatctgagacaccgcatggcccgaggaggagaccgtggacgtgtgccgcaacgtgttcatgatgtcatccatcatgcgttcgcatgcctccacgcgcatgtcctgcttcgccgcatcatccagcgggtgcattttcaattcggcgagcagactcttgagatagtccttctcccagtgcagcgcctcgatctgcagccgctccaatccctgtgggtcggattccccgacgcgctgcttcaatctcgtgatgcgcttcgtatacgactcgatgaccatgagcaccgcgcggcggttctcatcgtcgactcgccccgtcagctcctcgacggtcttgcgtaggatctctatggtgatctccgtcatttcgggtgccatgcggtcacggttcggagcgagcagaggcagcatgaaattcgccaatagtagcgtgacgacgatgacgccggatgcgatgaaaatcaactcgtcgcgcatggggaacggcacgccccaagtgacggtgaacgggatggtgaacatcagcgacagggtgatcgtgcccttggcgcctccgaaggtcatcaccgcggcgctgcgccaacgggccggcgtcatcttgcgccgtttgccagtgttgacgtcgcgcgccaaacgcagcatcccggccacccacaggaaccgcatcgtcaccacgaccagcgacaccagcagaatcacgatgctcaggcgcacgttgctcacgccgggatcgtcccaactggcgctcatcgccttcggcagctgcatgccgagcaggatgaacacggcaccgttgaggctgaacgacagcacaccccatacgctggacgacacgatgttggtgcgggcgacgttcggcccgatgccggtccggtcgaaccgcacgaacaggccggacgcgaccaccgcgagaatgccggacacgtgcagttcctctgcggtcaggtacagcatgaacggcaggaacagctccatcaatatgcgggtggtggtggtctcccaacccagcgagcgcacggtttcgaacagccagttcgcgagcaggccaatcgtcagaccgtatacggcaccgccgatgaacgagagcgcgaactcgccggcagcccggccgatcgcgaactcgccggtgatggcggcggcgatggcgaactggaagccgacgatgccggacgcgtcattgaacaacgactcgcctttgagcacgcccaactggcgcaggctcagcgacgcctccttgcccagcgagctgaccgccaccgcgtcggtcggccccagcgccgcgccaagcgccagtgcggcggcgagcgtcacggacggccagacggcatggacgatgacgccgaccgccaccatggtggcgatggccagtccgattgccaatgacaatgacagtttcagcgatttcagcaattcggatttgtcgatctcgtgcgcttccagatacagcagcggcgcgatgaacagcaccatgaacagttcgggattcagggaggcgttggggaatcccggcacctgcgtgatgatcgcgcccatcgcgatctgaaccagcggagtcgacaccttggggatgaaccggctggcgaacgacgagaatacgacgacgccgataatgcacagtatcagctgaaagacttccaaggctcgctccggctctccgtcggttgtgtgggattacttcacaatataaaccgactccgcacccgacacgttaacttcggcgtccggcttaacggctgcgcgcgggcaaaaagaaaccccggcggtgttgcccgccggggagagaaaggagagagaagaagaaaggggttcagttattgagaatcgtgctgccgattcccggtcggcttgtgctgacagttaatagtaaaacacccgtttcttggtgcaatgctgagattgtctgaaagcttcctgtgagttgatgtcgcgggctgaatcccatcacatggtaatggctgtagactgtagtgtggcgccgtgcgccatacacgtgagcgcgaaaaggagaatcctcatgctgctgtccgaccgcgacattctcgccgcccagaaggacggtcatatttctcttgacccatggactccggaaatggtgcagcccgcgtcgattgacgtgcgcctcgaccgtttcttccgcctgttcaacaatcatgcctacacatacgtggatccggccgagaaccagggggcgctgaccgagcagttcgacgtcgctccggacgagccgtggatcctgcatccgggcgagttcgcgctcggctcgacgtgggagtacgtcaagctcgacgcgacggtggcggcacgcttggaaggcaaaagctcgctgggccgtctgggcatcctcacacattcgacggccggcttcatcgaccccggtttcgaggggcatatcacgctggagttgagcaacgtgtcgacgcttccggtcaagctctggcccggcatgaagatcgggcagatgtgcttcttccagctcagctctccggccgagcacccttacggctccaagggcaccggctcccattatcagggccagcgcggcccgacccccagccgttcctacgttaacttctacaaggccgacgtcaacgactagagccgatacccaagttctttgacgcaatgtgccggcgactccatgactgggccgccggcacattgttatgctccgttcgatgccgtctggcttattggcgaatggcggtgaacagcaccgactgcgccggatgcagcgatggagggcgcaacccgtaggtcatcagcgcccggcccgtcatcagcacgccgtctttggtccaccagcccaacggcgactggccgctgccaagaccaagcccgtcgagatcgagatccagccacaacggctgtatgcggtacgtgccatcggggtcaagaccgggcacgcgaatcggcgccgcagggagagtctgggacgttgtcagttgcgtgaaccggtagaacgccgcggaacgatccggcttgaccatgccgtcgacccggacggccggatcggcgatatcggcgtgcacgcacgtgtcgatcgcgaaccatgcgcggtgcctcttgtattcggcgacccattcgccgagcttgttcaacgcctcgtccggctccttgagcagattccattcgacgcccatgtgcccgaagaacgccatcgccatgcgcatctcctggctcgtggcgcgatgcgtggaatgtgcaggactcgcccccacatgctcgcccatcatgcagggcggcacgagcagcgacgtgtaccgctgaatatcggcccgctcgaccgggtccacgcagtcggacgtccacacgcggctggcgaattcgagtatgcccaggtcgatacggccgccgcccgatgcgcaactctcaatctccagtcccggatgcgcgacttcgaggtcacggaacatccggtacacggcgagcgtctgcccgtgcaccgccggcctgccggtacgtggcgagaccgcctcggtgacgaatttgttgtggtcccatttgatgtagtcgatgcccaactcgccgaccagcgcatcgatggaatcatggatgtatcggtaggcgtcgggattggtcaggtcgagcacttgctgcgagcgtccctgcatcggcagacggttcgcagtcgggcgcagcacccagtcagggtgggcgcgggccacgtcggaatccgagttgaccatctccggttcgaaccacaggccgaactccatgccttttccgtgcacgtaatcggcgagcgccttgaggctcttcggcccgtccggccacacatcctgcgctatttgccagtcgccgagcccggatgtggagtctcggcgggagccgaaccagccgtcatccaccacgaaccgttcgacaccggaatccccggccttatcggccagagccttcaacgtgtcgtagtcatggtcgaaatacacggcctcccacgtgttgagaatcaccggacgcggcttgacggcgagatccgggtgacaggagcgtacgtaatcatggaatctcgcagccacctcgttgagcccgtcaccgtacgacccgtacagccacggggtggtgtacgtttcgccgcgggcgagcgtggcctcgccgccgagcagcacctcgccgccgccaatcagaccggtcgtatacggctgacgctctgccgacagcacggaattgccgctccagcccacatgcgccgaatagacctcgccatgctcgaacccgaagccgggctcgcccgcggaaagcaacagagaggcgtcaaaacctgggcgccccgccatcgagaccttctcgaagcgtccttcggtcagcggctgccgctgcgggctgcgttcgcgcagatgatggccggtggtggtgagtatctccgtggcaagtgccgggagcgggaagccgagttcgactttaccgacttccaagtcaccggtcggaagattaccggctggaagattacgcagcgtggtgcgctgtctgatcagtccgccgggcaacagttcggccgtccatgacagttccacgccctgctcggtatccgacgcggtcacggtgacgaccggcacctgttgcgtgacggtatgcgcggcaccgtccacgccgtcggacacgtcaacgccttggcgttcgtcctgacggattgcgatgccggtcaccgtgaatgcacagaacggcgctacgccggcgcgccggatatccagtcgcggtgcccctatccacgactcgctttgcgtgggcatgatgcttggccaggcggtctcgtccagcgcgccggacacgcgctgcggccgcagggcgtcgtatgcggcgagtacggttcccggcgccgcgagcgggcggccccagtgcacgaagcgcggaagaccgtgaccggcgaagatcagcgcgaacgccacatcagcagccggctgctcagcataaatagcggtgagttccgttccatcggcggcggcgccatggaattgttcgatgagtgacattgcgaatcccttcggaacgtgccattgatatatggttcgcctccgatgctacgacatcgttccgtcatgtcaccgcatattcagcgattccggggtatgagaagggctcccgttttccgatgtggagagcgggagccctgactgccggtggaggcttatggcattgttatgccatgatgccgcgcttgcggtcgatggcgcgcatgatcgccttgtagatttccgaggcgatcagcacgaccgcggcgaggcagatgcactcgacccatgcccacggtccgagcggcgtggtgccgaacgcggagttgaggaacggcacgtagatcaccacgagctgcagcacgacagacaggccgatcgccccccacagccacttgttggagaacaggccgacgaacgcggactgacgtgcggaacgcgatgcgatcgcgttgaacagctgcgcaaacacgagaatcgtgaagcccatcgtacgggcctcgatcatctggaattcgtgggtgccgccgatggagcggtcggtgaacaggccaccttcaaggtgcatgtccatgccgatcaaggtgacggccgccatgatgatgccgatgaacgcgatatcgatccacatgtccctgtcgatcacgcggtcggtgagcttgcgcgggctgcgtgccatcacgtcatcggtctgcgggtcgacacccatcgcgagcgccggggcggcgtcagtcagcaggttgatccacagcagctgcgtggcgagcagcggcacggcgacaccggtggttcccggctgcgtgatgccaagcacgccggcgagcatgacgccgccgaacacggtgaacacttcgcccacgttggagctcagcaggtagcgcaggaacttgcggatgttgtcgaagatcacacggccttcgcgcacggcggcgacgatggtggagaagttgtcgtccgcgagaatcatcttcgcggattccttggtcacctcggtgccggtgatgcccatcgccacgccgatgtcggcggacttgacggccggggcgtcgttgacgccgtcgccggtcatggcggcaatgttgccctggcgctgcagcgactccacgatcttgagcttgtgctcgggggccacgcgggcgtacacggagacctcagaagtcgccttgtcgaacgccgcctcgtcgggcatcgcgtcgagctgatcgccggtgagggccttgccgcccttttcgatgatgcccagatcggaagcgatgcgggccgcggtgagcgggtggtcgccggtgatcatcaccgtgcggatgccggcgcgatgcgcttcggccacggaatcacgcacttcggtacgcggcgggtcgatgatgccgaccatgccggcccagatcaggtcacgctcgatgacgtcgctctgctcggagatgtcggtcacctggccggctgcattggtcttgatgccggggatatcggccagggatgtggtgccgagcgggcggtacgcctcacccagcgtgcggtatgcctcgccggacagacgctcgacggtcgcgagaatctcctggcggtcgccttcggtcatcgggcggacggcgtcgccaaccgcgatgcgcgtgcagtagccgagcagcacatcgggcgcgccctttgcatagacgctcaggttgccgttgtcgctgctgtccttgccgatcacggccatacgcttgcgctcggacgtgaacggaacctcggccacacggtcgagcttgccgagggcgcggtcggccttgatcttgcgggaggcgacgacgagcgacacctcggtcgggtcgccgacgatctcccactggccggcatcgttctgacgcaagtcaccgtcgttggcaaacgctccgacggcgatggtgcgcagggcttcggcgttgaccggagcgctctcctcgatggcgtcgccacccatgcccagcatcttgcccttgggctcgtaaccggtgccggtgagctgcacttcaccgctcggggtgacgatgcgctcgacggtcatctcgttacgcgtgagcgtaccggtcttgtcggagcagatcactgaagcggatcccagcgtttccacggagctcagcttcttgacgatggcgttgtgcttggccatgcgctgcacgccgagcgcgagaacaaccgtcagaatcgtcgcaagaccttccggcactgcggcgacggccagcgaaacggccagcagcagcgagtcgatgagatcgtcgggcatcttgtggaagccctgcgtgatgaacagcgcgacgagcacgacggccgcgatgatgcacacggcaatgcccaggatcttggagacgtgggtcatctccttctgcagcggggtatcctcgtcatcggtctgcgacagcatgtcggcgatcttgccaacctgcgtgttcatgccggttccggtcacgatcgcgcggccggtgccctgggtgacggacgtgccgttgaaaatcatattggtgcggtcgcccagcgccttggcggagtcgagcgtgtcgggcttcttgcccaccggcacggattcgccggtcaggctcgcctcggcgatgcgcagcgacgcggcggcgaacagacgcccgtcggcggagacggtatcgccttcgccaagcaccacgatgtcgccgggaaccacgtcggcggtgttgatgtgcacgattttgccgtcacgcagcacggaggtctgcggtgccgtcatttgggcgagcgcctccaccgcctgctcggcacgggcctcctgaatatagcccagcaccgcgttgacgatcaggatcaggatgatgacgatggcgtcaaacggcagcacttcgccggccgttccgtgcgagcgctcgatgaaccatgcgatcagtgagatgacagtggcggcaagcagcaggtacaccagcggatcctggaactgcgccaggaacttcttccacttgggtacgggcggcgcgctggccaactggttcgggccgaatttctccaaccggcgctgcgcctcggcggaactcaggccggtgttggtatccacatccagcgccttggcgacttcgttcgcctcggtcaagctgggatcgacgtcgtgaagcaggccttcctgcgactgcacgcctgtggattgatcatttgtgtgatcaaccataatggtctccttgatatagccgcggagtagtcagccctcacgatcaccgggatcgtcccctcccccggtcatctcgataaagctgcgcggttatgggcaccggcgcaactgctgccgatgcatactgttgccattattccacaaacccgtcatcgcttggcgaaacagccctttacgtgttgtccaaatatcagcattccgcgaacgatttcaggcgacacgctcacacagcgcgagcagccagcggagcgtcgccatggtgtaatcgaacagttcgtcgtccatgccgaaataccgctcgcagcactccctgctcacatcgaccatcgcaagaccttctggctctccgggtatgaatgacgccgcccgatcctgcattcatcatacgtgccaaggcaaggaactccggcggcttcggaaccggacgagcttcgttccgttcctaagtgcgcgccgaaacgacaactctgcgcacttaggaacgcaaactatgcgatctgcgttcctatgttcgcgcactcggcgttccggcgcgcacttaggaacgcaaaccgagtctctcaggagattggggcgattcgcgcgcctcgaatggctgtttggcgtgggggtctgggacaatggcacgtatggcaatcaagaaaggtccgaccaaggggtcgggaggaaaacaccgcaatgcgctacgcggcaaggggccgacgcccaaagccgaggatcgcgtgtatcacaaggcatacaaggccaagcaggcgacgaaccgtcgcaagatggcagatccacgactggcagcccgccgtcgcgccgcgaagttcacgtccgattcggacgatctggtcatcggccgcaatgccgtgctggaggcgctgcgcgtcggcgtccccagcatgcagctgtatatcgcgacacgtatcgagcatgatgaccgtacacgcgagatcatcaagctcgccggcgcacaaagcctgcacctgctggaggccgaccgtctggaaatggatcgcatcgcccggtcgtcgaaccatcagggcgtcgtgctcaaagtgcagccgtaccagtattcgtctctcgccgagctggcggatatcgccgagcgcaaggccaaggccatggacgtggtgaattcgccgagtgcgcgcatcaacgcacgcccactgttcatcgcgctcgacggcgtgaccgacccgcagaacctgggtgcggtgattcgttcggccgccgccttcggtgccaacggcgtgattctgccggagcgtcgttccgcttcggtcaccgctgccgcgtggaaggtatcggccggtgccgcggcgcatatcccggtggctcgcgtggtgaacctcaccaaggccatcgaaagcatgcgcgaacgtggatattacacggtcggcctagacggcggcggcgataagctggtcggcgaaaccggtttcgagaccgatccgctgatcgtcgtgctcggttcggaaggcaagggactgagccgactcgtgcgcgagtcgtgcgacgcgatcgccggcattccgatcacgtccatggtggagtctctgaacgcctcggtcgcagccggtatcagcctgtacgcggtcgcccgcgcccgccgcgaagcagcggcagccgccacgaagtaatacccatatccccccccctgctgccggcggggtcatcgagcggaacgaaaatcggggtggccgccgcaatcggcgcaccaccccgtccggtttcgctcagcagctccacatatcagtggctccacaccgcggcatcaggatcgtcgtcgggattgtaatcatcatcgtcgatgggcttttcgtaattcgcctcatcgtcgaccacaccggaatccgcttcagcgttgagctcgttcacggctttgtcatccagcttgtagttcggcagcacggattggatgtagctttccacagcctcgcccatcggcacgtcgtggccggccttctcggcaaggaaccagcggtgatccagcacctcatggaagaactgtgccggctcgatctgcgaacgatattcacgtggaatcatacgcacggtcggctcatacacctcacgcatccaatcggtggcgacgatctccaactcctcgccttcacgccacgtggaggcacggtacgcatccagatcgttgagcaggcgccgcgcctgattctcctgcacatctaaaccggtcagtcgcagaagcttgcgcgacgcatagccggcatcgaccacgcgcgggcggaccagcacacgtttgccgtcctccgcggtcttcatctccagctcgtccacgtcgaagcccaggtcgttgagcttgttgacgcgctgctcgatcttccacatctcatccgggccgaacttgtcggtgtcggtcagcgtgctccacaacgagtggtagcggtcgaccagacggttgcccacctcgatctcgtccacgtcgctcggcagcagacggccagaagccaaatccatcaattcaccgatgatgttggtgcgagccaagtcgatatcgtattcacgctggccatcggtaagctgcacctgcaaatcaccggtttcggcgtccaccaggaaggcggaaaacgcgtcggcatcacgcaggaacaggacgttcgacagcgacacatcgccccagtagaagccggccaagtgcaggcgaaccagcagcacggcaagggcgtcgatcaaacgctcggcagtatccggctggagattgcgggcgaacagcgcgcggtacggcagtgagaacttcaggtgacgggtgaccagaatcgcttccagcggttcgccattgcggtcatgacgaccggtgaccacggcaatcgggatgacggtcggcaactcgagcttctgcagtcggcgcagaatctcatactcgcgctcggccacctgacgggtgatctctttcatggcgtacacctcgtcgcccacgtgcacaaaacgcaccacgtggcgggagatgcctcgcggcaggttggccagcaggtcctcgggccaggtggccaggggcttatgccagggcagcgtgaacatcttcgggttcgagctggcggcggtgatcttcaatgcttgcggctcagctgaactggcatgttcgtcttcggctttgacggacgtggccttcagcgcgcgcggatccatctgaggcaaatcgttcaactccatgtgttcgattctacgtggtgcttgggaagtgcagcgagtagcggcgacttcggcgcgttattctcgcatacgaataaatcatctgtatgggatttgccggccgaattgacgtcccgcatgcggcgcctcatgcgcaatctgaacaaaatgaacgcaacaagtaacatgagccccgctgccgcggcaatgctgcctacggcggcacccgtacgaccgataaggccaggattgcccggctcctcgctcgggttatcttcgggcgggacaacaggagttccagtgctaaatttcggctctactgtgatgttgagatcagcggatgtgcctccactgccaggaatcgagatgaggaacggatcacagtcgtatgctttgttggctttcgccgagctcgtgcgggagaccagatataggccgagcggcagattctggaaagtgagctgaccagctacgttagtggtgccggaatgctggtacagcttgtttttcgccgcgtgcgcagcgagcttcttggcagcatcgtgatattcacttgatgtcaggcgttcccaatcggcagtgaggccggaaaaatcgccgacggttttatatgaggagacgctaccatcattgttcgttgtgacggtggcgacgcgcacgatggaataggtatcgccggcaagcaatttgggcgaagccgtgtctcggccccatacggcattgatggtgagagcgccgaaagaatcagcttgcgcatacggcaccatagagccgaaggctgcaagaacagtgaggacgatagtaacggcggcggcaatcatggcagcaatgcgcgccgcaccatactcgcttccgctatgcaggtctaacatgtctgcccggtcctttccgccgtgatgaatgtgattggttatttgtactgtctggctgaggaggcaagtcaccgtccggctcgatatccgcagagtcagaatcaccagatgcgaccttggcgctcccactctgccggcgtcgccgctcatggcgctgccataaatgccatgcgatgagcaaggcaatcagtgcaagagacggcaacaagtactgcagcggaatgtccacgtggaacgtggatttggcgtcatcctgctgctgcggcgtgtatgggatgcgatggccacgcaccagcagccgatgcgtattgaccgcatacggcgtacaagtgatgagcgtgaccaaatccttgccgggctcaattgccagttgtttggtatcggtcggcagaacggtagtgatcttatcgacctgatacgcatacgtgtctttaagtattgtgatgtagaacttgtcgccttttttcataaggttcaagtccgtgaacagttttgccgtgggcaagccccggtggccagacagcgccgcatgagtggacgcgccaccaactggcagtgaggtctgttcgagatgtccgatgccggattgcaacactttctcggaagtgccgtgataaatcggcaaggtctcctcgagcttaggcacagtgatgtatcccatcatgccgtcaccgtcaatattgagcagactgttgtattcctcgtccgtggatgcggaattgacggcactggcaagagcgtcggtctctcccgcatcgttctgggcgagcttttcgttataggcgtgcgcagcatccagcaccttctggtactgttcctggctcaatgcttcaacgctggcgtcgtagttatttacggcgcggctggcgttgcgcataatgaggaagttgctgatcgtcggatagaacagaatgagcattccaccgagaatgaccagtacgggcaggatgttgcgcagtcgtttcatcgagcgttcttttcgcgaggaaaccgtgttgtgggcgtagcgggtgtgtgcccttcacgcccaaaacacggccatgctcgtcaggcgttcttgcgcttgagagtccaggcaacgccgagcgcgatgaccagcacaccaatcaccgtgaaggcgatggtacccatgccaccagtgccaggcaggacaacaccgggcttgttctggaccgggatgacaccgttcgatgcggtctggtcgtagacgctgccattgttggttgtcgtatttgatgacgacggtggcatgcgtggtgtcagtgccgttgttctggccatcaaccttcacgccgatggcgctggcgagcttgttgtagccggccggcgctttggtctcggtgagcgtgtactcgccgttctccagtccccggaagtcaaccttaccgtttgcaggagtggtgatagtcgtcgtagcacctgcctcatcagccttagctacacggtatacagcgttctgggtcgcactatcagcgactttcacgaagctaatagcagtgccgcccttatgtgcgagtgtgaactcagcaccagcaagtcgagtagcggtatcatcataatttttaccagtgtacttatcgacggtgaagccataagtgaagacgcgaaccttgctgggttcggactcaccggtgccattggtgctcgggttgttggagtactgaatcgttgcggagttgacgttaccagcaccgcccacaacagcatccttgttcagcgtggccgcgtaggtgacggtgatcttcttgccggcattggcctgctgcttggtcttgaagtccttcatggcgacagtaagaagcgttttgccggagtccgcaggagcagtggtgacggtgtagtcagtgtccttggtcagtgtcgtatctccgaccttaacggaagtgacttgtccaaaggtgagacccttagacaacgtatccttgaagttgaaggtgtaggtgttataggcggacatgtccggaatggtggaagtcagggtgaaggtcagggtatcaccgatcttcgcgtcggtggcgtccttaccagtgccgtttacctgtaccttcttgtcgacggtaggcagggcgcccttaatctcggcatccacactggtgctatgaacgcgaactagcgcggcgtattgactgttggtgtcggccacggtagcacccggcacagcgaccacgtagtagccgtagtcgagattagtgaacgtcgcagtgtacttaccgtccgtggcagcattcttagataccgtagcggtcgcgtcagccgtgatgttgttggccgttctgcgcccagttcgatgccttggcagcgaaagcactcaagtctttttcttccagtcagcttggatacgtactcgtttgctttatcgttgacgttcgcgtcggtaacaccagttagtccgtcggagctcatgaagaacggcttccacccgtcagtcaacgtgtaggagacagccccgccgtcactgctcacggtggcggagaacatcttgtaggcgttcacggtcttaccggcgaacttcgcgtcagtagtgctgaccgtcagcgtggcattatcacccgctgcgttggccgtggcgactgtcgtcgcagccaatccaaatacggtggcaatcgccgcggcggcagcgaaaacctttttcatcagtgacttcattactgttcctttctctagatggaaatcttttctgtttggcaggtacggtttgtctatgtggtcgtcacgaggcatgggcacctcgctttcgtatacggctggagcccgagcggactgtgccggattgaacgcgttgattacgcacgtaccagaccacgccagctcccataagcagcaagccgaacatcaggaaccacatcgtgcccgcgcctcccgtatccggaagcaacgccacattggtaacaatggccacgcgttccttggtgttgtaggagaccgatacttggtatccggcctccgcgggcttgatggtcttggtggtatcgccgtccttataggtcacggcggtctcttccacggtgtacgtgtagtaacgcacgatgtccttgccgttggcatcctgtccatccacgaatgcgaccggcagtccttgaatcaccttgcgccaggtgttgctccaggaagaggcatcggaggagtccaacgtcaccgtccatggattcttctgcgtcacggttgtgcaatccgcgccgaagcattgaatcgtctgcggcgtcaccgtattgccactgccatcggtatagtgcgcggcgatcttcagttcgaccgactgcggccgttcgaggttgccgtccttccataccttctggacggtcaggtcaatggttcggcaaccgtccttgccgcacgggtcctggccgtcgtccggttcgggggtgagtccgccgttgttgtcggtcacggtcgcgtcgagcatgagcacggccttggccggggactggtaggcatcgagcttcgtcttggtgctgccgtccgtggagttgaccacggcgtccttaatgccgacccaagtggtgccggcgtcgccggatgcggagctgtgcacagcgccgctgtcgtatgtgttgaccacgtcgaacagcttcacttcccaacgatcgagtccggtgttcagcgcatcgtccgccgtgttcttctgcgagaagatcttgttgccgtcctgtgcggaggtacgggcctcactagcgttcgcggccgccttgcggtaaatgcgataggtgttgtatgccttgccgccgttgccgtcatcgaccggtccgaggatgtcgctcatggtgttgaagtcccatacggacttgagtttggtgttcgagaacgggtcgaccagtccgctggcaccgcggatcgtgtcggcgtagaccatgtggtcgtctgccagcacgccctcgtcgttcagtccggcgaagccgcccgtgtagcctgtggaaagatccttcacaccgtcggtatcctgagttgcccctccgccaaacacgtcatagccactggcgatgcccgttacggtggactgttccacgcgagtacggttgcccttgatgagctggacggtcaggttgctgcccgatccatccatatcaatgccgtctttgctgcaaggcagtttgatgacactatcgccgatggtgacaatcgccacgtcggtctgctgctggttttcatcatcagccttggacagagcaacgctcaccttcagtccgaacaggttcacgtacagcacgttgccttccgaaagcaccttgagatcgaataccttgccgaagatggccgggaaccacttgcctaaatcgatgacgccgacctgttccgccttgtcgaggtacaggagcttgaccagcgcgttcaccacatgcagcagcagttccacaagtacagagttgaccttcgcgtcaaccaaataggcacggctggtttcaccgacgaatccgccggcaatctcaccgctagtgaccttcttgagattgtcagacgcgcagcccttcaccctggccagatccgcgtatccaacaaaaccgcctgcgacctcgcgtccggtagccttgtcggtggctttgccgtaattgtcgccatggtgtgtggcggtgacggtataaccgtccgggatgccgatgacgcgcgaatcgccaacgtgcgagccccagatgtcaagtacgccggccgtggcaccaagcagattgagcgcatctgtgccgagttgtgcattgtcggcggcgaccgtgccggatttgccaagatgcccgatgaagccgcccacgtagttcacgccggtcacactgttgaggttggtgaccgcagactgcttcacagagccattgatcagtccaccgccgaagccaccggccgcaccggtgtaacgcttcgagtcaagcatgcccttcgtggtggaatcatgggcgacgacttggatgccgtcgttcacgccgttgacctgaccgtcatagatgaaggtgcggaatgcttcgagcacgcccacgttgccgaccttgagcagtttgagcagcaggttggtattctgcttatcgccggcctcgccgccgccgacggaagcgacgctggacacatcggcaaggccgaagaagccgcccgcgtattgcccgccttcaacggcgcgcagcccggtgactgtaagtgcggctgggtcattgttcggatccgcttcactgccggtgcctttggcggaatccttgtcaccgaggatcgaggcctgcagcgagccggcgaaaccgccggcgttcagggcatacttggttgtggtgttacccttatcgtccttggtctcatatgcgccgtcgaccgtgtatccccatgccgggtcatccgagctcacatgcgcaccgcgaatcgtcgtaaccgtggcctgcaatacgctgaccagacttgccggggtcgagaccagcgagtcgaggattccttgcaggaatccctcggatgcgttggtgtccacatccgcgaccgcgccggcagtggccacgccgatgaatccgccgacattgttgcgcccttccaccttgcgcaggttggaaacattggcaccggcagcggtgacacccttgacaagcttctggccgttctggtcgagatcgccccagatctggccgccgaccgcgagacccacgtagccaccggcgttgccggtgccgtgcgtgatgtcttcgccggtggccacgaccttcatacccttgcggtagccggccacgctcgaggatttgatgactggcacgaatacctgtgccacgtcgagcatctgacccagatcaagtttgatgcctttgtcgccgaatagttggatggagccgaacgaggatgccgagccggattccatcgtgcccgcgtagccacctgccgcacgcatggcggagacggtcttgacgtccatcgactggccatcggtgatcgtgccggtgcgcatcaggccgacgtgtccgccggcgacgccggaatcatgcaggttcgcgccggtccgatactccgcacgtcctgcgacgacgttgaatccgaagatgtaggattcgaggaacttgtccagggaatcctgatcagtaacagagcccgcaccatcgcccgtagctacatcggtgaattccttgccatacgcaccgtacttgccgatgttgtcgacccacgtcttccactggtcgtagctcatattgcgcagcggaccggtgaccttcgtgtgctcctcggtcgggtagaccacggacagcacgccggcgaggttgccggccttgatgagaccgccaagcaaggagagcgaaccgccttcagcggtatcggccgcttccatgaagccggtgtaaccgccggcgatttcggcaccgtatacgctgcggatgcgcgcggcgtaggctacgcgccgcggcccgttgtatttgccgtcggtgttctcctgcttccatgctgctgtgttgttgccccagatatgaccgccacgattacgtcccgcatagccgccggccatgccgcggcgtgtggtcgtatccgatgccgcctgggcacgcaccgcgccgccgcacactgcggcatcggtcgagctgttgcgaatcgtcggtgtgaagtcctgcacgagcgagagcaggttgtcgaggttgacaagcttcttgagcacgctgccgtcgccaagcacgttcgccacggctcccggctgcatggcacccacgtaaccgccggccgaaacctggccgatgatgtatacgaactcatgagagctcgagtcctgaatatggccgccttcgatgtctccggcgaaaccaccagccatacccagtggatcgggctcattgttggcattcctatgatctgcggtgctggccagaacggagtatccgccgatgccgccagtcacatcggagtgttcaatcgtcgagacgacgacatccagcacactgagtacatcgttgagattgacgttctggccgagcagcctcaggccaccgcccacagctgccgccgagccgatgtccattttgccgatgtagccgccggcataccgagcggcggtgactgcatacgagctgtctttgctcagataggtgtcgtcgatggatccggcggtttccagattcttcggtgccttgacatcagtacggcgcagttgggtcacgctggaatgggacacctgcacaccggaaccgtagccgatgtagccgccggcggaaccggattgcgtatcggactgatcaaatcgggtggcggaaacggtgaagccgggatcatccgggtcggaaatcttgttaccgctagtggtctccacggtggtggcatcggaatgcacacccgcgtaggagatgaatggcacatagccctgcaccacctgcaacaggttggcgagatccaccgtaccgaatttgccgagcaaactcaggccgccgttgccagccgaagcgagcgcgccggaaacgaccttgccgccgaaaccacctgcgtatgcgccgccggtcacatggtcaaggttgacaacggccacggggttggtttgcacgcgggactgtacaccggccagcgttgagtcgttcttgagatcggtttcggagaactggttgaccttgccgctttggaagtttcccgcatagccgcccgcgatatcgccttcgacataaccgccgttgacgtatgtcacggtggtatccgtataacttggaatcagatacggtacggcaccgagcaggtcgttcacggacagcaggccgcctttgatcaggccatccaatacgctggaatcttctgcgttgctgagcgcgtcggcgaggccgccggtggtggagaagcccacgaaaccgcctgccacaccatcggacgtgctggtatcggctgtgaccgatttgaggtttgtcacatggctttcccgggtcttggtgctgttggcctgaccatagaaaccgcctgcagcgtaatcggttgtttcgttgttcttgttcttgccggttgccgcaaccgtgaatccgccagagatgccgttcacgttcgatgcagtgactgcaaccgaagaatattgggcaaccgatagcagaccagaaagcttgataagcccaagcacattgagaccgccagcgccgatggcgtcgcctggtccagagaagccaataaaaccgccggcttctcccctggccgagaccgtggccagattggtaaggttcgtgtgggtcacgtcgccgccggtggcgcatccgatggcaccgcccgcatagtatgaaccagccgtcactgtcaggccggatgccggagcggtgacagacatgttctccacggtgaacgcggcaaactggtcgaacttcttgagcgtggcaatatcgccaattttcaccacactgttgagcaacccagctaccgttgtcggttgcagattgccggcgatgccacccgcgtaggagcccgtggccgtgaccgattcaaggccttctatggtggtggagcgctgctgagggaagtcacgatgattgttgtacttccagaatgtgagtttttgaaggcggttctgcgaggaatcaccgatcaccgtacccgatccttcgcccacgagaccgcccgcgtaatcgccaccagccttaacggtgagggagcccttcatctgcgtgccgagaatcacggagggattcacaccgacgatggacagcagttctcctgcaccgttattgctgccgctcagcaatttagtcacagccttggtgagctgtttcaacagcgatgccttcgtggtatcgtccgtaccgagttccaggccccatcccacggaggcgaatccggtgaatcctccggcgtgggatccgtcggcagtcacggcgaccgaagccgtaatcgaattattgaccgcataggcattggccatggcaccgttgaagccgccggcgtagtcttcggcctgcacggtgatcttatcgtcaccgtttatcgtcaggccactgttttcgatgaggctctgcggacgcagcgcagacagcaagtcgacgccaagcgagttaatcagaccgcctacgttgccgttgcgacttactccggcaaaaccaccggcatattgcgttgcccgcacggtgaaaccattcgtgctcgtcaccgaagagttctcaatgattgcaccaatctgcgcaccgacaaagccgccggcctgcgggttgtccttgttgccgatcaccacgttctttttgaacccgttcaccgaactattcgagataaccgggttgtagtagccaaccggaatcaaggcattcagcccgagcgtgccggacagcaaccagtccaccaaatcgcccagcccgaggaacgggatgacgttcagaatcttcgagagtacattggtgagcgctcctacgatgccggagactgcatcgtatcgggttgcgccctcaacatatcccacgaaaccaccggtcatacggcttacgctagataccgaaacatctgctacctcgcagtccgtaaccttggtgtccccgtagatacggccggcaaatgcacccgtggcgaggttggaaggatttttttcgtgcagggtgagcagaccttgaagattgaggtcaagatctacttgtccgaatgtcaatagttttaacgccttcaacagtgtgtcgagcagtaatcccactgccgaagtgagcataccgagcaaggtcggcggaatatacgattcactcgtatgattcgtcaccgacacatcctgcagcttgaggttcgacactacggccgtaccggcgctgcccagactgttgctgttcatcacggtcttgttcgtgatcgaggcgaagaagccgatgccctgctgcttgctgacatccagctggtcgcctttgacattagagaccatatctttctgattgacgaccacatggctgatgaccggccgagctgcggtagcgtgaaccacgcttgcgccatcggcaccaacagccttccacaggctggctgcggtgtcgccgtcattggagaccgcaccgagcatagtgccggagaacatgagcggagtccactcggtgttgttggtatctgccgcgttcttggacaggtcgatgtcacggaagatcaggtagttggcgtctgcggaataggtcaggccggtgttggcagcggagtagtccgtttgcgtgccatcagcacccacgccgtaatacttggtgcgggtctttccgatgtctaaccgcgtgctgcacagcagtggactgtcgtggtcggaggcatcagcatcgcgcaaagtatctgaattggagagatcggcgtcaccggcgtattcggaagacggcgtgccgtccacccactgataattgaggggtccttgtcgcgtacaagtctgcttgaccttgttgatgcggccaataaccttcttgccagaaccaatcgcacgcagctgctgctcgttaccaatcaggatgtaggtcttgccgctgatctccttggtgacctgaccctcaaaatcacggccgccaagcgccgtcgcggcgacctgcacattggccttcgccggcgattgatccgtcgcatttgaggaatcgttcttggcatcttgagaagaagcatcgtttggagcctgagtttgggctccatcattagcggaattgccagcggtagcttctgctgagtcgtccgccttattgtctgtcgcgccatttgaggattcggaaggtgttggcgcaccgtttgatgtattggcctcttctgacgtcttatcgtcaacgttgacattgcgagcagaaggagcagctacgacagtattatccccccccccagaaattacggcgttaggagagctactcacatcgtctatattctgagcatatgctgcaggcaccatgcacacgatggacaaggaaacagcaataaccgaagcaaggcaacgcttcaaggcatggcgctgccttccagattcctgttctgttcctccgttaaacccgcaacggacgaacttcgatttcgagcccattgtttcccctcatagattcgcaatccctttttcgggaggtcactgcatacaattatacaagaagttggcccgttgtctaattgaaagtgcaacacccgttattggagattgtccagataaccagtccgaagggatgttgcacctatggggaaagtatattcgcacctgtcggaagaggaacgccaggtcatccagatcgaggtcggcaacgacacgagcgtcaggaagatagcccgtttgctgggacgcggcccgtccggcatcagcagggagatcaggcgcaacacgtggttcccgtccaacgagagcgagtcctaccggccgtaccggccgaagcgtctgaagacgggcccgtggacgggccgctactacatcgccggccccgcgcagcgcaaggccgaccggcgcagggcgaagccgcgcaagccataccgcctgtcattcggccgcctgtggtcgcgggtggccgaatggccgggtagaggctggtcgccgccgccggtcagcggcatcatccgccgttgcctgcccaaacgcacgatcatcgaacccggtatggcaagagggctccaggagatcgtcgacgagaccgacaaccggcccatgcgcgtgctcggccaccgcacgcccgccgaggcattcgccgacgagctgctaaacttgcaagacaaacaaggatgttgcacttctaaatagacaacggggacaaaagaacaaaaacgttcatctgcgggggccggttagcgtatgtctttctgggcaaaaagaaaagccccgcaactacgcggggcttttccaacgaggccataagagaggaagagaatcgcctcgtttaatggttggcatgaccgaagtcataccaagtatctgctagttcctctactagttcagacgcagctcggtcgacggagcgaacaggtgcatcttggaggggtcgatcttgatcttgacggtctggccgatcttcggcagcgcacgcgggttcacacgaatcgtggtgagcttgttctggtcggacatcatcgtggatgcctcggcagcggagccatcggtgatgatggtgccgtagatgtagccgtcggagcccagatcctcgatgttctgaaccttcagcgagaaggcgttcggatcgtccggggtggccagggtggcatcctcgggacggaagccgacgacaatcttgccgccatcctcagcggtcagcttgttgacggcctcggcgggcaggtcgacggtgtcctcaccgatcttcgccttgccgttgacgaccgggtgagtgttgatgttcatcgacggggagccgatgaagccggcgacgaagacgttggccgggcgatcgtacagctcggtcggagcgccgacctgctgcaggacgccgagcttgatgacggcgatgcggtcgcccatcgtcagagcctcggtctgatcgtgggtcacgtacagggtggtgacgccgagctgacgctgcagggcagcgatctgcgtacgggtctgcacacggagcttggcgtcgaggttcgacagcggctcatccatgaggaagaccttcggctcacgaacgattgcacggcccatggccacgcgctgacgctgaccaccggacagagccttcggcttgcggtcgaggtactcggtcagatccaggatctcagcggccttctcgacgcgcttgcgaatctcttccttcggggtgccagcgatcttcagggcgaagcccatgttgtcggcgacggtcatgtgcgggtacagagcgtagttctggaagaccattgcgatgtcgcggtccttcggctgcatcgtggtgacatcattgccaccgatgaggatgcggcccttgttgacctcttccaggccggccagcatgcgcagagtcgtggacttaccgcagccagacgggccaacgagcaccaggaactcgccgtccttaatgtcaaggttcaaatcatccacagagggcttatcgttgcccgggtagatacgagtgacgtggtcgaatacgacttctgccatgatattcatcctttcagaggcaggtacgtgcctcacgatccgttgtaaagggattactgtgccttgatcatcagtccctgcactggcaacatcaaaccgcagcgttctttttccttcggttcattgaagactctcttcgttgagccacgtactactatacacgtccgctggaacacgtcaacacgcgcgtctgaaacgcggacgtaacatcgacgggccttcaaccggcatcccgcagccggcattatccttactccggcctcatctcagtcccccctcctcccatccatctcccgcctctcccctccccaagtcctctcctctttttgcgttcctaagtgcgcgccgaaacgacgaccgtgcgcacataggtacgcaaacagggccatttgcgtccgtatgttcgcgcacttgtcgttccggcgcgaacttaggaacgcaacggcgcttccggctcaatcggcatgctcgaatatcgggtgcgccccggcacgcggcacaccggcctgcatcagcttcatgacgaacggcgcgcgctggaccacttcgatgtaattcgtccgtatcacaacgctcactccggcctctttcagatcctgttcgcgctgcctttcgtcacggaccacctgccgaacatcccggttcgacgtcatctctggatcgatgtatttctgcataccgtcaaactccagcacgatgatgcggccatcttccgtatgccagatgaaatcgacccggcccgcctccttgccggtcacgcggctgtaaaacgtatgctgcaattgcggaggaacaaacccttcttcgatggatacagcccggcagaacgactctcctccgttctcgctgcgagcatccgcataatgcagcagacgaaataccggcccacaatccactcgcagaccatcacagacggcgacgatctcctcgcgggtcacgagcccccggcgcaacgcggaatcgaacatcgacagcacgtgctcgaacggatacaagagcgcgcagtccaccaaggttcttgccggactggtcacacgtacctcgccgatacatacattgtcacgcaatgcccgttcgtgggcgatccggtcagccaacttgctcacctgactccaggtattcgacccgtcctgtgctgctccatcaccgcgaggccggtacaaacggaccacatggcagtcctcccgtatatcggatctacgcaccgagatgcgccgcagccggtggtacgaccgacgtgacttggtgaatccgtcagtcgcgatgtacacgtatggctcgtcatgcagcgtccatgagtgctcgaacccgtagatgaccgccgcgctcagtccggcgaatacgcgctcgggatgccgtctcgccatttcgcgaatgacatgtgacgcttgctcaatgggattcagaccatcccagtattcacgacgcgcgtacacgctgcgaaatggccgcacgacatcgccgcaacgagttcgccgcagcatcgcctgtcgttccgccgggctggacgcggaacaacatcgcccgtccatttccgcccggttcatcagatcgtctagatgcttgtgctgtctcatatgttgatgatgacaatatggaccgccgctgcgcaagcgaatccggggtatgtggtcgaaggctaggcgattgtggataactcggcgcgtcgcggcggcatcaacggctgtgacgacacatttgcgttcttaagtgcgcgccgaaacgacaagtgcgcgaacttaagaacgcaaaccggcccatttgcgtttctaagtgcgcacagtcgacgttccggcgcgcacttagaaacgcaaacgatatcaggggggggtagggagtatcgaaggggacagcaggggaaggaggaatatcaggggtagagagaacgggcacagggcggtgagtaggataggagggtatgagcgatgcgttgaatttggagcccggagcgttggtcggcggctacacgctgatgtcgcggctgggatccggagccatgggatcggtctggcgcgtgcatgatgacggtggcgaggaatacgcgatgaagatattgcgcgattcgctcgccgatgaccgttcgacggcgtccgcgcgcgatcagatcacggcacgtgagcggttgcgccgagaggcgatggcgttgaagaaagtcaatcatcccggcgtgtgcggcatcgtggacatggagttggatgattcgctggcgttcatcgtcaccgagctgatcgagggcaaaaacctgcgcgacgacgtcgccgcgaatgggccctacgtcgccgatgacctggaacgactggcatccaagctgatggacgcagtcaaggcggttcatgcggcgggcatcgtgcatcgagacatcaagccgaccaatgtgatggtttcggcgaccggcccggttctggtggatttcggcatcgccatgggcgaaggcgaaagccatgtgacgcgcaccggcctagtgatgggaacgccggggttcatcgcgccggagattatcgagggaaccgaatccgatgagatcacggactggtggtccgtgtcttcggtgctggcattcgcggcaaccggaaagcccgttttcggcaccaagccgatgatggcggtgctggaacgcgaggcgtccggcaacgcgaacctcgcaggtcttcccgccaccaccatgacggcgttccgtgcggcgctgaacccggatcgcagcaagcgctgcactccggagcaactgctgcaggcgatcaccgtggacgcgttcaaccccggcgcctggcagcagcacgacgataacgccgcgcaatccggtcagacggatgtgatgcgcccttttgaccataccgacctgcgcaacccgcgtctgttatggcgcccgcatgagccggccggatcaggtgagaagccgactgcagccgtcaccaaggcaggaatgccaaggcaaaccgcgatgcccggcgttcggcccgctttgcagcggatcatcggacaatcggcgccctcaccgtatgcgacggttccgccgattccgaggctcccaaacgccagccaagccgctgacgctgcatccgccagtcttcgacggctaccatcaatcggggcaggagcagatgccggaacctcggacggaaccgtaccgctccggggagcaccgctaccgggaaatatcgcgtcttctcaggcacccggcaacgaccggacggcgccgatgtcccgcctcaccccacctatgccgccgaccatgccggtcggcaccgaagcgaccgaatcgttgcgcccacagccgacatcggttctgcccgcctccaccatgccattcgattccacggtcagcgtcggacgaaccatgcccatgcaaccgcagccgacgacggccctacccacggacgatgcggacatgaccggagcaacggccgtaatcgagccgtcatcatccgccgacaccgcggcaaccctggcgatggatgatccagtgtggtcggggcgccagcaaatccccaccatgaacatgccgccgctgagcccccagcagatcttcgccgaccctgatgaagccgcaacgccgacgaccgcaatgcaacccggccagcccgcacagctccagccagccgcgcaattccagccgtccatgcaagccatgccgacagcgcaggccatgccgccgatggccatgaacccggcagacatcaagcgccagacctatctgcgtcaaggcatgccgctgctcgccgcatgggcagcacccatagccgcaatggccgcgagcatgccgttggcggcaatggtcgcagccacgttgctgtgctggctgctgctgacgatcggctattcgacagacgcccagctgcaacgcgagtacagacgcggcggcacacacagcgccggcgacaccgcgatgcgcatcatcacgctgccatggcacgccctcagggggttgcctgcggcaatagggcgcgggctgctcgccgtcgcgacgctggcgctgggatccaccctcgcgacgctgatcttcagtctgccggtcgtaaacacgcggttcgccataggcggcatcaccattgtggtacccatcatcgccgcctcccccgtgtccccgtcgggtctggctctggccatctgcgcggcgatcagctggatcatcggtatgctggcgcccgcgccgaccatgctgcgacttggcaccggcaccctgctcggtctcaaccggcccgcgggctccagcggcgcaggcatgctccccgaatcgtccgacaacgaaaccactcccgcgatatccgcccaacattccgggcgtgaattcgccgtatggatcgcatgggcggtgattacactctcagcgtgcacgctgctcggtctcggacagggcatcaactggtggccgctgccctccaacgtcgcataacatccccatcccagctgcatgccgagcgacggcaatgcccggtttgtagccattgtcacgttccatcatgcggcaaacggcgcaacccgccgccggaaaagcgaacccttctactactatgggcaacaaaccggcaggaaagggataactgtggcacaaaagaatcagaacgcgaagcgcaacaccagggcaagccgtcgcgccgccgaagagaaggcggcgcaggagaaggcggagcaagcggccaaggagcgcaagcagcaaaccatcatcggcgcggtggtcgtcgccatcatcgtcgtgctggtggcaatcgccggcttcgccatctatggagccattcacaagaacgacgtggcgaagagcaccaccgaggagcaggcataccagcagctgcaaaaggtcgagaccaagccatcggcggccgacgacaagggcggcatcctcatctccagcgaaggctatggcaagaaggtgtccggcgcccccaccgtcgccgtgtacatggatccgctgtgccccggctgcggcgagttcaaccgccagaccgatcccacgctgatctcgctggtggacgcgggccagatcaacctggagatccacccgatgtcgttcatggacgaatactcgaccgacgaatattccagccgcgccaccggcgccatcctgtacatcgccagcaatgacgacaaccccgatcacctgctcaagttcatctcgaacatctacgccgaggacttccagcccggtgaggccagcgaatacaagtcggtcaagaacaaggcgctcaagcagcaggcgattgacgccggcgtaccgcagtccgtggccgacaaggcgttcaacggcgaatacaagaaatggatggatgccatcaacctgtacaccccgaagcgccccgaactgtggcaggtgtccggttcgaacaagggtgtcatgagcacgccgaccatcaccatcaacggcaattactgggatcgcaaccagctgtcactcgccggcatgaacaacaagaccggcatcatcgcgtcgctgggcctgaaggaagacgaagtcggccagaagggcacgatgccgtcgatcggcgaatcgggcaagccgatctcgctgacgaccggcgaatgacgaatgacccgtcatgcccccgcagatgaacgatgacactcccgtagacccgtgtcgcgctgtgatcttcgaccccggccgaaggaaccgcaacacgggtttgcgacattctgaattgaccagcgcggtgaaactggtaagctggtcaatcgttcgatggcacctgtccgcattgtgcgaatggggtccgcctccttagctcagatggccagagcggccgccttgtaagcggcaggtcgtcggttcgatcccgacaggaggctcgcggcacagcataccgcgtgtcatgtgcgatgcacggtcgacatgtagtaagctgtgtttacatatagtcttaccttgtgtaagtgccagaagccttcccccaacttatggcttctggaaggcagagcgtcccccaattagctctgcccacaggggggcgggacaatccccttctctcccgcccccttcttctttatcttgatatatgtgaccaccccagtagctccgcgacagcccttcgggcagggcaaaaaagtaccaaatgtgggagtatgggtgacggtcgtgcgatgcccagcgaagcatcatcgtgattggttacaatgctagccgtagctcatggaaggatgacatatggccaggcggtggacaccacgacgttttgttcgattgcgtcgcattcgggtggcgatctgcgccgtcgccgtggctcttgcctcaacggtcgcattcggcgtcgccgcacgcaagaccatcgcactcagcatcaacggcgacacccagaccgtcaccacgtatgccatgagcgtgacgcgcctgcttgaagagcggggcgtcgacgtcaaatcccatgatctggtgcaatccaccagcggcgacatcctcagcaatcatgacgtggtcacggtccgcagcgcatatcagacgaccatcagcatcgacggacagcgcgtgccgttctggaccgtggcgaccagcgcctcccagctgctcgggtttttccagcagaacgagaacgaggccgcgaaagtcaccgtggacatcgacaacatctacagccagctcaccggcggcctcgtcatcaacgagtccggcccggtgacggtcatcgccgacggcaaaacgtcggtcgcgccgaatggcaagcttcccgccgcgtcgattctcgattccaaaggcatcagcctcaacaaggaagaccgcgtcagtgtcgagaaggacggagacaagaccgtgctgcgcgttcagcgcgtcacccacgggcaggagacgacgaccgtcgccattccccatggttcgcagacgattgttgataagtcgttgaagccaggaacatccgtggtccgccaacagggggaagacggcgagaagaagcaggtctataacgtcacgtatgtcgatggcatcgcagagacgcgaacgctgatttcggagacgaccaccaaaatctccctcgacaccatcgtcgccgtaggcccggagaaggccgccgaaccttccgacaccagcaaggggcaagccgataaaggcagtgacaacgccggcaagtcaggcaacaagtcgaataccggcaagtcggatggcaactcctcgaatggcagcacgtccggcgcaaacaagtcggatgatacgtcgaacaatgacaaaaacaacgacaagaacaacgggaattcgggcaacaacggcaattccgggaactcagggaactcaggcaatagcggcaactcgggaaactccggcaactcgggaaactcgggaaactccggaaacaacggcggcaacggcggcaacggcggcaacggcaactccggcaactccggcagcagctcgcagggacgcctatggcacccgaccgccgcgcaggccaaagcctacgcatccggcgcggccgcacagcgcggctggaccagctacgactggacatgcctcgacaagctgtggacccgcgaatccagatggctgtggtacgccgagaacgcgaagaccggcgcctacggaatcccgcagtcgctgcctgcgagcaaaatggccgagttcggcgcaaattaccgtgacgacggcgctgtgcagatcgactgggggctggcgtatatcgcccaacggtatggcagcccatccaaggcatgggaacgctccgaacaaatcggctggtactgatagcgagcgttatgactgacatgaatccatcccctgcaccttccggagcatccgcagccgccgagaaacccgcagccgccgggcgactgctcggcgcggccgacatccgtcacatagcagccgaagccggcatcagcccgaccaagaaattcggccaaaacttcgtcatcgatcccggaacagtgcgccgcatcgtgcgcgaggccgcggtcaccgccgatacgcgggtgctggaagtcggccctggattggggtcgctgacactggccatcctggaaaccggcgccacgatgaccgcggtcgagatcgacccgccggtcgcgcaacggctgccgcataccatcgacacatacatgccggatgcgaggaaccgcctcacggtcatcaacaaggacgcgctggccctcacgtcggcggacctccccgagttcagcggcgacgaaccgttcaccctggtggcgaaccttccgtacaatgtggccacgccgatcatcctgacgctgctggaacgcttcgacatgctgacgtccttcgtggtgatggtgcagaaagaagtcgcggaccgtctgaccgccactcccggctcgaagatttacggcgcgcccagcgtgaagctggcgtggtacggctcggcggaacgcgtgggcaacatcgggcgtcacgtattctggccagcgccgaacgtggattcggccctggccgggttcacccgtgtccagtcgcatgcgggcccgcgcgacccccagttgcgccagctgacgttccagttggtcgacgcggccttcagccagcgtcgcaaaacgctgcatgccgcactcaagcgcatggtgcccgatgaagtgttccacacggcgggcatcgacccgacacgccgcggcgaaacgctgaccatcgacgaattcgccgctctggcgacggcgctgaggcaatcgcagcatgaacaggggcaggcatcatcatgagcgccacagcaatggacaatgtacggtcagcgacaccgggtcaggcgcggcgttcgccaagcgtccccgcgcattggcccatccgccgtcatgtcgcagccgcggaaacgacaccggccgggccgctgcactcggtggaggtcacggttcccgcgaagaccaatctgacgttgcacgtagggcccgcccatgaggaatggggcggccggcacgcgctggacacgatatattgcgccatcggcgtcaacgacgtggtgacggcgaccgccaagacccccggcagcgggttctcgctcgaactgagcggcgagcatctgggtgatctggcatcgagcggcagcgacatgcgccgcaaccatgcggtgcttgcgttgttcgcgatcgccagggccgcggggcgggagccggacgtggcgctgcatgtggacaagcacattcccgtcggcgccggattgggcggcggatccgccgacgcggcggcgacattgctcgccgtgaacaccctgtggggactgcactggccgattgagcggctgcgtgacatcgccgccacgctcggcgccgatatgcccttctgcctggagggcggatatgcgcatggcaccggtttcggcgagcggatcatcccgctggaggatgattcatcgtgcgttcagacgctgcgagaccgcggattcgccggccaattgctggtgggagcgtaccgtgcgcaattgagcacgccgaatgtctactcgaccttcgacaagatgggcgcgggagacggcgacgacaaccatctgcagcgcgccgcggtcgccttgcacccccgcagcggcgaagccatcgaagccgccctggccgccggggcatcccggtcattcgtttccggctccggcccatcggtcatcgcgttcgtaacggacgatgccgtcgcccgccgcgttcgcaccgcatgggagcaatccgccacggtggatcgcatcatcgctgcacaggcgccggcgagaccggtcataaccgtcctgccatccctgtcttatcgcgtcagacagtgacgctaatctgtgtaccagtctcgtaagaaaaggacggacccatgactcagccttatgacgaacgcgcggaacgcaagcgttacattcgccgccgccagcagatcgtattctcctgtgccggcgcggtgcttgccgtcgccctggtcgtgtcggcgctgttctatttccatgtcgggggtctgggcataacggccacgtccgcagtcaagccgaattacggcgtgcgcgtgccctgctcgaccaaggacgccaacggcaagaaccagacatattccaactatgcgaacgtcaaggtgcgcgtgctgaacggcaccaaattcgtcggtttcgcgaaggccgtcagcaccgcgctgtcgaaccgccagttcaaggtcaccggctgggacaattacaagggcaagaaggtcgagcgcaccacaatctatttcggcaagaacgccatcaacgaggcgtacacgctgaacacgaacttcacggacgcggtgatggtgatggatgaccgcgacgacaagctgattgatgtggtgctcggcgcctcgttcaacgatctggccaacaaggacagcctgccgagcggcgacaccgccatcgaaaacttcgagggatgcgtgcccgtacagtcaatgggcaccttgcccaaggccctcgatcatgaaaaggtggaatgacggccagcatcgtcatgacggcctgaaacccccgatattcggcggctgcctgccttacgcggacagccgccgaaccgtttcttgggcacgtttacagcgacgcgtgccaccgcttgagctcggccaccgcggtgtcatggtcgaccggaccgttatcgagccggtattccagcatgtgcttgtatgcgcggccgacctccgggccgggagcgatgccgaggatggtcatgatctcattgccgtcgatatccggccggatggcgtcgaagtcctctttctccttgagatcgcgcacgcgctgctccatctcgtccatggcggacgagaacaccatcgccttgcgacggttctgagtggtcgcatcggcgcgggtcagccggttcagccgctcatacagcggaccggcgtccttgacgtagcgtcgcacggcggaatcggtccacggttcttcgacatacccgtggaaccgcagatgcaggttcactaactcgctgacatcctcgacgagatgatggtcgaaccgcagcgccttgagccgtttgcgcgtcattttcgcgccgaccgcatcgtgatgatggaagctgaccttgccgccgggctcgaaccggcgtgttttcggcttgccgatgtcatgggtcagcgcggccaggcgaagcgtcaggtcgggagcgggcacggggccttccggcccggtctccagcgctatggcgcgatcgagcacaatcatcgtgtgctcgaacacgtccttgtggcggtggtgctcgtcgatttccagctgcagggcgggaatctccgggaacacgatatcggcgagacctgattcgaccagcgcttcgacacccgccctcggacgatcggacagcagcagcttcgtgagctcgtcacgcacccgttcagcggatacgatgtcgatgcgatcggtcatgtcgctgatggcggcagccgtgtcgggggcgatgctgaacccgagctgtgcgacgaaacgcacggcacgcatcatgcgcagcgggtcgtcgtcgaaggactgatacggatccaccggcgtgcgcaatacgcctttagccaaatcgctggcgccgccgaacgggtccacgaactccagctgcggcacgcgcagcgccatggcgttcacggtgaaatcacggcgggacagatcgccttcgagcgaatcgccgtagctgacttcgggcttgcgggattcgggatcatacgtgtcggaccggtacgtagtgatctccaccttgacttcggtgccgtcctcgcgccggcgcatcgcacccaaagtgccgaatttgcggcccatatcccagaaaccgtcacgtccccaatgacgcaggatcggctcgaactcgtcgggatgggccgacgtgcagaaatcgaggtcgtgggaacgccggtgcagcaacaggtcacgcacggggccgcccaccaacgccagctcgtacccgcgagccgcgaacaggtgtccaagttcaatggcttccggccaaacttcgaaattcacacgaggcctttccataaagtattaccgcttttatgcgtattcaagcataccgttaccccacctgcacacggtattgagtaaggtggaagtcatgattacgcccgcagacctcgcgcgcatgcttgcgcatgctgcgggcgaccatacccaaaatccgctcgaacccgatacgttgctctatacgtccgaggctccgcgcacgccgaaaaccgttgtcaggccaccggaaccacgctttcccacgcctgcgatgatgccgcagcgacgggcgggcgacgggccgaccacattcgcgtcgctggacgctcaggagctcccggtggtgcgcgaatactcggccggcggcctggtgttcgacgagcgcggccgtgtggccatcatcgcgcgacactcccgcaacggccatctcgaatggtgccttcccaagggccatatcgaaaagggcgagacgccgcagcagaccgccgtgcgcgaggtgcacgaggagaccggcattctgggtgaggtggtcgagtccattgccaccatcgactattggttcaccggtaccagccagcgcgtgcataagctcgtgcatcatttcgcgctgcgccagatcggcggcgacctgacggtggagggcgatccggatcatgaagccgaagacgccatctgggtggatttcgatgatttggatgacgttctcagctatcctaatgaacgcaagatcgcttggctctacgcaaggaaaatgaagcagggatgatcgcgaacagccccgagcacggtcaggccgtgccatcgttatctcaccgaacgacacgcctatggcgcttctttaccatcatgttgctgacatgcgcgatgctgttcgcaggccgcatggtaccggtcggcccggcacatatggcgatggcagatgacgagacggacacggccacgcagacgaccgccttgtcgatcaccgaatcgacgcccgtggtcaccgacacatccggctaccacatcaccatcagcatctccaatcccacgtatgccgcgacgtcaccgggcctggtgaccgtggcctacaacccgtcatatacgttcgtatcgcgcactgacatccagcattgggcgaccggggacgtatcgattccggtgcgcaccgttctcggcacggccacggtgccgtccatcgcggcgaacaagaaggtttccgtgaagatcgacgcggcggccgacagcgatgcgttgaaggcgttgcagatgtgggggccgaaaccgctgctggtcacctatcaggcgacccaggcgaccgattctcaatccacgggctcctctgacgggtcatccgggtcggaccgtaccgtcgatccgaacgccaagccgattcgcctgcacagcttcctgaccagatcatcccagggattgcgcaacgcacagaccccgccgatggccatcaccatggtcatgccgttgatgaacaccggccagcaggccgacaagaacgccatcgaccagctcgtggtgcatgacaacggcgatggatccgacacaaaatctacacaatcaggtggcggcggcacggatggcagcacagacgacggctccggcaacaataccgacgactccgaaaacaccgcggcgacgcaatcatcagtgctcaccccgcacgacaatgatgcactcgccgccaaactctccctcatcggcaagcacagcgatctgcagaccatagccgatccgacggcattggcttccgacaccgggcaacgcatcgatgccgtcatgcagccggccggattcgacatcaccgcctatgccgcgatcaacaacgtccggtcgtacgaacaggccggcgtcggcaccggcgcatggaacgcacgatccgcactggccgcggcaccggcatcatccaattccctgcccatcgcctggcaaggcaagggcgattggacccggcaggcgctctccacggccaggaagcagggataccagtacgtcatcgccggtcacgacttcgactccagcaccacggccaccgtgcacacaggcacatacacaatccccacctcggccggcgacatcacggtgctgagcgagcagaaggaactcggcgacctcgtcaaaggcaagcccaccagcagtgatgcggacggcgagaccagtaacgcgggacgcatcgcgcggttcgtcgcgcagagcgccttctatcagatggagcagccgtatgcggcgatgaaccgcaacttgctggtctgcttcggcactaatatgtcggcggcgttcatcgacacgctgatgaccgcggtcgaacagtcctcatggctgcaactcaccgacctgaatgatctcattgacgcagacgcctatcggaccggagacaaggcgctgcaaatcgtcccccaagacagtcatttaagcgagcggaacacccgatcggtcacgtccgcgctggaatcgctggccgaaagccgcaacgacatcaaccgcttcgccacgtcggtcctcaccgaccataaggcatccgcgtcctggatccgcaagatcaaggccgcacagagcacgctggcactgcatgcgctctcgtccgcgccgcgcaacatcgacagtctggtcgacggcgccaaacggctcggcggaggcatgttcggcggcgtatccatcacgccgaccgactccatcaccgtcgtcagcgaaacggccaaaatgcccgtcaccgttaggaacaaccatccgtatccggtacgggtgaaggtctcatccctcaccgactccatggaaatcgtcacatcgcggttcactgaggtcaccataccggcgaacagcgaggcgcaggtcacgttcgccatccgcgtcgccacttccggccacgccacagcccacatcacattgctggaccgcaacggcgacacgttcggttccgcacagaacaccgacatcaccagcgtgctgcgcatcagcgacatgaccggattcatcatcatcggcttctcgctgctgctcggcctggtcggcctctggcgccaattccatcgaaagaaggaccccgacgaatgagcaccacggtaggacgcaattcgctgatcatggcgtgcggcacggccgcgtcacgtgtgaccggccagatccgcaccatcttcctcgtcggcgcgctcggtaccaccggtatcgcagccaacgcgtatcaggccggcgcgcagataccgcaggtgatcttcaacctgctgtccaccggcgtgttcaacgcggtgctcgtgccgcagatcgtgcgcacgctcaagcagaaggacgcggatgagcgactcagcaagctcatcaccttgtccatcgcgctgctgctggccatcacactgctgatggcgtccggcacgccgctgctgacgatgctgtacctcgactccagctggacgcccgcgcaaagggcgctggcgaacgccttcacgctgtggtgtatgccccagatcctgttttacggcctgtataccgtattggggcagatcctcgccgcaaaggggcgtttcgcgacgtatgcgtggagctccgtgggcgccaacgtcatcagctgcatcggtttcggcgcgttcatcatgctgttcggcaacgcgggacggcagccgatgtcgttctggacatccggcaagatagccctgaccgcgggcgcctggacggccggcgtggcgttccaggccctggtgctgttcattcctttgctgcgttgcggcatccactaccggcctcgctggggactgcatgggctggggttgcgttccatgggccaggtggcggtgtggagcatcgccatggtgctgctcaaccagctgatgggcatcgtcaattcgcgtgttaataccggcgccccgaccgccggcggcgatttgtacggcatcgcgggcaacgcgagctatcagtacgcgtacacgatatacgttcttccctattcgatcatcgccgtgtccatcacgaccgcggtgttcccgcgcatgtcccgcgcgatcagcgagcatcgtatcggagatgcccgcgccgacctcagctcatccctgcgatccaccggtcttgcgatgttcttcttcaccgcggtcatgattgccatgccggtgccgctggtgaaggcgctgattccgtccacgaatgtgcatggggcgattctgatatccgggcctctgatcggtctgctggtgggattggtgcccaccagtgcgttcctgctggtgcagcgcgccttctacgcgtatgaggacggccgcagcccgttcttgttcgcggcggccgacaacgccgtgcagttgctgcttctgctgacctcgctgcgtttcgcgccgccgaaatattggacgctcatggtggctctgtcgctgagcctgtcatatatcatcacgttcccatgggtgttctggctgttgcgcagacgattcggtgggcggatcgacggcaagcgcatcttcatcatgcatgtcaaggccctgattgccggtgcggcggcatgcgcgtgcggactattcctcaacccgctggccacgcgtttggtcggagcgaaggtttccagcgtcaacggacatatgagctggtggcaatccatcgtcatatgcgcgattctgacgattgtggtgacggccgtgtatgccgggctgctatggctgatgcgcgtggaggagttctccagcctgatcgtcaccatgaaggcacggctgttgcgtaggacttccactgcgacatcggtatcgacaccggctgagtcggagaccaaggaagctcaggcacaaaacgcggaggtcgaagagggtaccacggcaattgcggagaatgataatcattacgatgattattcgctgggtgacgatggaacctcggagaatgacggttccgcggaacgggccgctgaaactgtgaccgatctcgaacggccggttcaggaccagccggttcaggaccaacccagggggattccgtccgacaaccttccgcccagcttcgcgccgacggtcaaccgtaagggccaacgcccgtccatcaagtccgtcgtactgccgaacgtcgcggcaaacgcagccggtgcagcggcaggtatcgcggccggcaacaacgcccagccgcgaattcccaccatactgccaacgccgcatcattccactcgtcaagccgcgtccgtcgcggctgcacagccgaccatccccacggctagaatgtcagcatcaccactatctcagcgcatgacagcagagcacggagaaacaactactatgaagcctcaattgggagataccgtcatcggtcgctacactctcgtttcttcgctgcgcgaaagtgacggattgagcgcatggatagccaatgaccgcatgctggcgcagtcctgccagctgttcatcatcaccgacacatccgttctgccgcagatcaacgaggcggcttccacgctcgcgctggccaacagccggtactgcacgccggtgctgcagctgcagcacgtcggcgatgccgcggtggtgatcaccgagccggactccggtctggcgctggcggaatacatgcagcgttcgtcttcctcgttcctcagctacgacgcgattcgatcgatcgtgggacaatgcacccaggcggttcaggagctgttggacacggggctgacccataccgcgctgagcaccgataccattcgcgtgagcgtcaatggcgtgcagttcgccgacactcccgtcgccgccgcattggccgatatctgcagcggcatcgacggcgatgtgatgtcgtatgagcagatggcgacgcgacagctggccgcactgctgtacgcgctgctgaccaagacgccttcaggcgcgaacacgacgttcgacctgaatatgctgcccgccgacgttcccacggaattccgcgtgatctgcaagcgtggactggctctgcacaccgaagatggggaagtcatcgtgccgatggcaacgctggccgagctgagcgcgctgctgggcgcgtgggagccattcagcaacctgtcggatcgtgacatcatattgccgtcggtcagtggcagcgcctcgatcagcatggtggcgttgcgtgacacgagcgatgacaagatcgtggaactgccggatgggctggttacctcgacgaagctgccggaattgtcgatttccgaggcgggactggcagccggcgccgaggccaggttcgttaacgagcagcgtctcgcgcagcaggcgttcctggctcagctgcccggagatccaccctcgaccgatcagccggtcatccccgaagcggaattgttcgaaccggataccgccgagccgtcgaagaccctggcctccctgcaatcgaaggtcggtcagcttatgggctccttgcgcaaggacggggagccggagtcgccggtgacgacatccactgcggaagagaccgcgattgagcagccgatgccggtgtatgcaccgctgccggcatcgttcccgcccgccgccaagccgcgtaggtccgctactggcgcgacgcaggcacgcaccggcaacggcgtgaacgtaccggcaaacgctgctggtgcgtctggtgttgcgggcagtaccggcaaaccccggacgaccggtgcaaccggcgagatacagagcatcgtggccaatatgccgaatgttccgctgtcggaagaggacgacaatgagcgcacccgcgccggcagcatcccgccgttgccgcagtccggtgaggcgcaggtgtctgaaggcgagcaaaccgtggctggaagccatcccacgacccgtgcggctcagcccattgccacgaacgccatgccgcagccgcgcgcgcatatgtcggaatcattggccgctcttgccgccagatccgccaaggccgcggcgtcgggcgacgccgtaatgcccccgtcattcgcagtgtcggcatcggcgcccggagccaatggagcagccatccccggatcatcgaagtcgcgtacgcggatgacggcaccaatcagccgcgatgccctgcggaacatgtctggcggccgtcctgcggcggctccgggtgcgaatgtgccgggtgtgcagacaccggcgcagcgtgcccaatccgacgcctttgaccccacggtcaccgttccgctgttaggcactgatggtacttcggtagatcagctgccgcctatggcccagatcatgccgccgagcttcgcgccccagcaggtgcacgatgtcaacgcggcgaatgtcggacacaatatcgaggaggacctgcctgaccagccactctgggggcagctcaagatcaaggtcatcgccatcgtcgtcgcgctggttctgctggtggtgggattggtcgccgcatggttcatcctgaacggagacaaccacggtggcggatccgacaatcaggattggccgaacaagaccgacatcgataacgtcccgttcggcaactcgaccacacagaactccacgtcaaagaactctgcggcacaatccgacatcgtgtacatccgcgttctgtaggcgacgcagaagttctcataggcaccccttctactcacgggtaggaggggtgtttcatcgtacgcggtgattcacgctgtggacttatgctgtgggcccgtatcgtgctcgtattagctcctccggtttccatgaacgcggcatgcctgtttcgcaatctgaaagcgaccaatcggcattcgaggcgaatccatgtcgttgttcacccaccgctggacgaggtcaggtcaactcgctatcgtaagggacatgactgaactttcaaccatcatcatcggttccggccctgccggatatacggccgcaatctatctcgcacgcgccgggtatcgcccgaccattcttgcgggtgagctcacgccgggcggtcagctggtcaacaccaccaccgtggagaattaccccggtttccctgacggcattctcggaccggaattgatggatcgtatgcgcgatcaggcggagtctttcggcgcatccatcgaatatctcgatgtcacgagcgtcgatttcagctcctcccccaagaccgtcacgtgcagcgatggaagccaatatcacgccgatgccgtcatcatcaccaccggttcgcagtaccgcaagctcggcattcccggcgaggccgagtattccggtcacggcgtatcgtattgcgccacctgcgatggtttcttcttcaaggacaagcccatcgtcgtggtgggcggaggagacagcgcgctcgaagaggcactgttcctgactcgtttcggctcttcggtgaccgtattgcaccgccgcgaccagttccgcgcctccaagatcatggtcgagcgcgtgctgaacaatcccaagatcaccgtgaaaatgaatacggtggcgacagccattcgcgggcagaaaaacgccgccggcgcgcagacaggcgctgatgcggtaaccgctgcggcacccgcagcgcagaacaccggaaatcttctctcgttgaagacgactccgatgctgaatgtctccggatcggcattgaatgctccttcttcgaccggcatttccctatcggcaaaggctgaaaccgcagatgattccgccggctttgtggacattcgcgacaccgtgacaggcgagacgggcacgctgcccgccgagggcatcttcgtggcgatcggccatgaaccggccacgcgttttgcgaagggttccgtggatatggatgacgacgggtacattctggtctccggtgccggaacgcatacttccatgcctggagtgttcgccgccggcgactgcgttgaccgggtgtaccgtcaggccatcagtgccgcaggcatgggatgccgcgccgcgctggacgcacaatcctacctggcctcactgcactgatccaacagcacagctcgacctgtcggcgaaatcaaacctcatcacagatgatgatattgcttcaccggcgggttgagctacacaaataatgcttgcactgtcagtaatcacaaacgaaacgacagactgaccgaaataacgctgcggacacttaccagcgccggagaatcgcatcagaacgacaatccgctcaaatctagcgcattgtactgaaccgattgcaactcatattgctcaacagagttttcggtaatgctttttcaggtgcatgcaatagaacagtcatacggacagttcattgcgttagtcctctgactgcaaatgccacgacagttgctttatacgcgttctgccggagaggcaatgaatacctctcggcagaccagatcatacggctcatgaacggcatgaccgttatttcccgttgtgtgatgatggcggctcacaccgttgtgtggctcacaccctcacacccattttgccgccgcgccctcgactgccgtgggaatcagcatgctgaggatgcgttccatatcctcaggggaggaaaacacgatttcgattcgaccgtgcttttgcgtacccttgatggacactttggtgtcaaaatgattttcaaggttgttgacaatcggagaaccggcccaaggattgttcttcgtcggccttaccttcttgggcacgttgctttctgcgttcttcatcgccacgatttcctcggtgctgcgaaccgaaagcccctcccctatgattcgagtggccagcttgtcgatttcactttcgtcattcaaaccaagaagagctcgcgcatgccctgcggacagtacgcctgcggcaactttcttctgcacggacgcaggaagattcagcagacgcaatgtgttcgcgatttgcggtcgcgatttcgagatcgacttggatagttcagcctgagtcaggccgaagtcatcaatcatctgctgatatgccgccgcctcttccagaggattcagtgcgacgcgatgaaggttctccagcagtgcatcacgcagcatctcgtcatctgatgtggttttgacaatcgccggaatcgtcttcagttgtgcaagttgtgatgcacgccagcgacgctcacccataatgagctcgtatttctgcgatgtttcacgtgaaacatcactcttgctggactccgcagcctgacgcttgcgaaccacgatcggctgcaatacgccgacttccttgatggacgcggccaactcattcagctcttcctcatcaaagacgctgcgcggctgctgcgcattcggaacgatggagctgacaggaatatccagcagatagccaccctcgacaggcttcaattctggagtttccttattatccttttccttgccggatgcctttgtgctctcggaacgctgagccggctgcgttttcttggaatcgctcgtcccctgtgctgttgctccgaaaaacatgtcactggggtgtgccatatcactgataccgggcatggcaacacgcttgccgctcttgggcttctccaccgttgtggacttgtgtacggcaggaatggaatccttcatggccggaatggtcttacgcttgatttcgccaagacgaaccggagcggtagactcactgtgttgttcagtaccgctcttatgggattcgaccttctctggcgcagccgcagctttctcttgaggggctttcttgttggctgtcgtctcctcggattcgagatcaacacccaattgctgctgttccgcatgagctgttttcgactcaccgggaagtgcggggaacagcgcacccaatcctttacccaaacgtgattttgaggtcatgggttactctcccctcttcgcgtcaattgcagccagcaccgaaggtgatcgacgggcgatttccaaggccgcttcgccataggcactcgctcccattccacgcgggtcatagctgatgactgtctttccgaaacttggagcctcggatatttttaccgtacggggaatcgtcgtatccagaacgatactcggatagtgactcttcacctctgagaacacttccctgctgagcaatgttcgtttatcaaacatagtgaccagcatagtcgacacagtcaaattagggttatagtgctcctgcaccaatcctatggtattgataagttgaccaagcccctccaaggcatagtattcagcttggatcggaatcaacatctcagacaccgcgcacatggagttgatgaccaacaggccaagactcggcgggcaatcgaccagaacatagtcataatgattgttcggatcctgcaggaatgattcgacggcttccttcagcagattgttgcgatttggcagatccgccacttccagttccgcacccgaaagttcaatggaagcgggaaccacatcgagccctgggatatcaggacaggttttcagtacctctccgattgtcattcgtccttcaagaacgtcatataccgaaggatcgctggtgccgtgaggaacaccgcatgccgtagaggcgttcccctggggatccatatcgatgaccagaacgtgagctccatgagaggcgagagctgcggcaatattcaccgttgttgtcgtcttgccgacgccgcctttctggttggcgacggccaggcatcgggttctcgatggcagggggaacaatgcggcattcaggcgttcatagcgtgacgcctcatctgcaatctcggcacccaaagaggaaccatcattcccgaaaatccttctgaccgtttcagaagcagattccatggcaggaatcacagaggattcctgtgaatcattggatgtcatagtccctcctaaaaaacgaacaacatctaatttttcctagtcgtatggacatctcaagttgtgcacagcaatgtggataactgtggataagtatagtgcattagtgtgtgaacacttcgatcaacactagataaaccgtttatttccgccatttttctaatgtggattacatgtcgcaaataatgtggataactttgtgcactgtttgaaattgtggataactccattcttgcgaaaccatcgctttcgtgtttgacatccattgtttcacgtgaaacaatcttcggacagtcagcgatgtcgatgaagatataacagcattgtttatgcgatcaaaggcaatgaatatcgtccgtctcaccccgcaatccaacctcccacagcggaagcaaaattacgattcccgtcagcgggagcatgggattatcgtgtgactcccacccatgggagccacacgataattagcgcttgtcgacgagaacgacgtgcgtggattcgagaccgggagctactggagcttcaacgacacgagcacgcactcccccggcatgggaaatttgatgcttcgccttttcaatctcagcctgcgccgaacggcctttcaatgcgaccagtcgaccttgagggcgaagcagaggcaacgtccaaccggcaagcttggtcattggcgccactgctcgacaggtcactacagagaatggtttcaattcaccttcgtggtgcttgatacgatcgatgacttcgtcggaacgtgcgcgaataatcgtaacattctgcaggtccatgtcatccacgcactcttgcaaccattcgacacgacgttccatgggctcaatgagtgtaaacgcacaatccggcatgcatgctgccgcaacgattccagggaaaccgccgccactgccaacatcggcaatggtctttgccttgcttcgattggtgacttcccgaatgaacgggacgcatgcggcggagttgaggatatgacgttcccagatgatggatatgtcgcgtgggcctatcaatccacgcagctcaccctcgcgggatagtttcacgtgaaacacttcgagcttgtcgtatgcttcgcccaatgcctcacgaactattgcggaatcatccagctcatcaccagatgtttcacgtgaaacaatatcgctcactcttcgctaccttcatcgacgtcggattcatcggcgttgctcttcatgtagatggtgacatagcgacgcggctcttcaccgtgagaacgagacttcagcccctcctcgcgaaccacatcatgaatgaccttgcgctcgaacgaattcatcggtttcaaatcaacgggctcaccggtgtcatgcacttcatcaatggcatcaagtgcaatgtcacgaagacgctgacgcttgcgcttcaggaacccgtcaacatcaacaatcagatgcgagcgttcgccggtcttctgctgaacagcaagccgggtaagctgctgcaaagcatcgaccacttcaccattgcaaccaatgagatgcttgatatccgtatcgtcatcagcgatgatctgcaccatcggacgaccgttgcgaacacccatctcgatatcgccttcgtaatcggcgatgtccaataagccttccaagtagtcggcggcgatgtcagcttcttcattgagctgatcgatcgtcgtggtctcctcctgcgccatatcaccactcctttaagcgagtattacttccatagtgtaaaaaaaggaaacctcacggtcaaatagaggtttccaatcgtgtcactttttcttgcgattcttccgctggggctgcttgcgctggtatccccgctccagacgaacagcggcttcctggcgcgccttctccagttcctcttcctcaatcgaaagctgtccggccttggcgcgacgagcattctcctgacgatgatctcgaatctccttttcctcagctgcacgggaacccggggtcgggaacttgtacacctggaacaaggaacgggcaaggttgcatgcattgttggtcagccagtacaccagcacggcgaacgggaacatgatgccggagaagatgtacatgatcgggaagccccaggtcatggcctgctgcatcttgtacgtggatccctgcatcgaagccttggggaggttcttgcgcatgttgttgaactgcatgtaccacatgcatgcgcacatcaacaggatgaagaagccgatgacgacctttccggaattgttggccgtaccgaaggtatcggtgacgctgacaccgaagacgcgggtttgcgcgaactgcttggcagtcgcctgatcgaatgcgccaagcgctcccctcttgccggtcgcgatatacggaatggcggaaagcatgtagaacatgcacatgaacacaggaccctgaatgacggcggtccagcacgaccccatggggttggcgtcattgtcctggtagagcttcatcatctcacggctcatggcctctttgctggcctgatcctttttgcccttgtacttgttctgaatatgctgcatcttgggctgcaaggcctgcatcttgcgcatcgacttcatctgcttgagataaatcggcaaaatacaggcgtgcaccacgagcacaaggaacacgatcgccagcacccaagagatgccgatcggtgccatgcccagcagggtgaggaacttatggaacaggaccatgacctgggtcatgagccactcaagtggggtcagcagcttatacagccagccccaaatgcctctgtcaagaagaaattctccggaagtgttcatcaggccatctccttaatcatcggccattggtgtgagtcgaggcttctcatatgccttcgaccagcgaaatctgtagcacagtgaaaaatgttgcggaacatcatcgatgccgccacgactccaagggttgcagcgaagaaaacgccaaataaacagcacgattcctcttaccgcgccgaagcgccgaaccgcagtgatcgcgtaatgtgagcaactcggatagtacttgcagcatggcggcgttttcgccgaaatggccctctggtaccacttgatcatgccgataagcgccgatccgatggctgacatcagcgactcaccctgcattcatgcgtagtcgtgactttggcgaagcaacgggaaaactgtcggtcaaggtcagcgaaatcgacacgcgatgcgctgggtttggctctcacgacgatatcgcactgcatcggaagcatatcttcatatcgtcttgcgagcacacgaaatcgacgcttcacacgattacgcgttacagcgttaccaacagccttgctgacggcaagtcccatacgtctcatgatatccgcagatgcctgaacatcacgggtatcgtcatgcaccacaaagtgcacgacgatatccgaatccgtcaccttgaagcgacgcttcagcactgcgatgaagtcacgatggcttttcagccgcttcactcgccttcgtcacctaccgcaatcaggcggacagagacttacgtcccttgttacggcggcggttgatcatcgcgcggccggaacgggtgcgcatgcgcacgcggaaaccatgcttcatcgagcgacggcggttgttgggctggaatgtcctcttcatagttatgctcccggtttttgccatgctgatgcacggctctcatgagtcaagctctataacggtactctgagccatgcccaaaaatcaaaatgaaaacaatttcttcacgatttatcagtgtgtcgtgccccttgcagagcagcggaaaacattggaaacacgccaaaacatgtagaaaagttatccacaaattacatgaatgttattcacaattgaggcgacacaacacgctaagctgtggataacttggctaaagtggagtacatatatcctgttgttgttgtacttattatagctaccgtagcgcatccgctgcggtgcgcaccggcacacatacctgaaggaggtcaca
